(19) United States
(12) Patent Application Publication
(10) Pub. No.: US 2008/0071073 A1
(43) Pub. Date: Mar. 20, 2008

(54) siRNA targeting ubiquitin ligases

(75) Inventors: Anastasia Khvorova, Boulder, CO (US); Angela Reynolds, Conifer, CO (US); Devin Leake, Denver, CO (US); William Marshall, Boulder, CO (US); Steven Read, Denver, CO (US); Stephen Scaringe, Lafayette, CO (US)

Correspondence Address: KALOW & SPRINGUT LLP, 488 MADISON AVENUE, 19TH FLOOR, NEW YORK, NY, 10022, US

(73) Assignee: DHARMACON, INC., Lafayette, CO (US)

(21) Appl. No.: 11/977,675

(22) Filed: Oct. 25, 2007

Related U.S. Application Data
(63) Continuation-in-part of application No. 10/940,892, filed on Sep. 14, 2004.
Application No. 10/940,892 is a continuation of application No. PCT/US04/14885, filed on May 12, 2004.
(63) Continuation-in-part of application No. 10/714,333, filed on Nov. 14, 2003.
(60) Provisional application No. 60/426,137, filed on Nov. 14, 2002.
(60) Provisional application No. 60/502,050, filed on Sep. 10, 2003.

(51) Int. Cl. C07H 21/02

(52) U.S. Cl. 536/24.1

(57) ABSTRACT

Efficient sequence specific gene silencing is possible through the use of siRNA technology. By selecting particular siRNAs by rational design, one can maximize the generation of an effective gene silencing reagent, as well as methods for silencing genes. Methods, compositions, and kits generated through rational design of siRNAs are disclosed including those directed to nucleotide sequences for ubiquitin ligases.

### CROSS-REFERENCE TO RELATED APPLICATIONS

[0001] This application is a continuation-in-part of U.S. Ser. No. 10/714,333, filed Nov. 14, 2003, which claims the benefit of U.S. Provisional Application No. 60/426,137, filed Nov. 14, 2002, and also claims the benefit of U.S. Provisional Application No. 60/502,050, filed Sep. 10, 2003; this application is also a continuation-in-part of U.S. Ser. No. 10/940,892, filed Sep. 14, 2004, which is a continuation of PCT Application No. PCT/US04/14885, international filing date May 12, 2004. The disclosures of the priority applications, including the sequence listings and tables submitted in electronic form in lieu of paper, are incorporated by reference into the instant specification.

### SEQUENCE LISTING

[0002] The sequence listing for this application has been submitted in accordance with 37 CFR § 1.52(e) and 37 CFR § 1.821 on CD-ROM in lieu of paper on a disk containing the sequence listing file entitled “DHARMA_{—}2100-US78_CRF.txt” created Oct. 1, 2007, 2.73 MB. Applicants hereby incorporate by reference the sequence listing provided on CD-ROM in lieu of paper into the instant specification.

### FIELD OF INVENTION

[0003] The present invention relates to RNA interference (“RNAi”).

### BACKGROUND OF THE INVENTION

[0004] Relatively recently, researchers observed that double stranded RNA (“dsRNA”) could be used to inhibit protein expression. This ability to silence a gene has broad potential for treating human diseases, and many researchers and commercial entities are currently investing considerable resources in developing therapies based on this technology.

[0005] Double stranded RNA induced gene silencing can occur on at least three different levels: (i) transcription inactivation, which refers to RNA guided DNA or histone methylation; (ii) siRNA induced mRNA degradation; and (iii) mRNA induced transcriptional attenuation.

[0006] It is generally considered that the major mechanism of RNA induced silencing (RNA interference, or RNAi) in mammalian cells is mRNA degradation. Initial attempts to use RNAi in mammalian cells focused on the use of long strands of dsRNA. However, these attempts to induce RNAi met with limited success, due in part to the induction of the interferon response, which results in a general, as opposed to a target-specific, inhibition of protein synthesis. Thus, long dsRNA is not a viable option for RNAi in mammalian systems.

[0007] More recently it has been shown that when short (18-30 bp) RNA duplexes are introduced into mammalian cells in culture, sequence-specific inhibition of target mRNA can be realized without inducing an interferon response. Certain of these short dsRNAs, referred to as small inhibitory RNAs (“siRNAs”), can act catalytically at sub-molar concentrations to cleave greater than 95% of the target mRNA in the cell. A description of the mechanisms for siRNA activity, as well as some of its applications are described in Provost et al. (2002) Ribonuclease Activity and RNA Binding of Recombinant Human Dicer, EMBO J. 21(21): 5864-5874; Tabara et al. (2002) The dsRNA Binding Protein RDE-4 Interacts with RDE-1, DCR-1 and a DexH-box Helicase to Direct RNAi in C. elegans, Cell 109(7):861-71; Ketting et al. (2002) Dicer Functions in RNA Interference and in Synthesis of Small RNA Involved in Developmental Timing in C. elegans; Martinez et al., Single-Stranded Antisense siRNAs Guide Target RNA Cleavage in RNAi, Cell 110(5):563; Hutvagner & Zamore (2002) A microRNA in a multiple-turnover RNAi enzyme complex, Science 297:2056.

[0008] From a mechanistic perspective, introduction of long double stranded RNA into plants and invertebrate cells is broken down into siRNA by a Type III endonuclease known as Dicer. Sharp, RNA interference—2001, Genes Dev. 2001, 15:485. Dicer, a ribonuclease-III-like enzyme, processes the dsRNA into 19-23 base pair short interfering RNAs with characteristic two base 3′ overhangs. Bernstein, Caudy, Hammond, & Hannon (2001) Role for a bidentate ribonuclease in the initiation step of RNA interference, Nature 409:363. The siRNAs are then incorporated into an RNA-induced silencing complex (RISC) where one or more helicases unwind the siRNA duplex, enabling the complementary antisense strand to guide target recognition. Nykanen, Haley, & Zamore (2001) ATP requirements and small interfering RNA structure in the RNA interference pathway, Cell 107:309. Upon binding to the appropriate target mRNA, one or more endonucleases within the RISC cleaves the target to induce silencing. Elbashir, Lendeckel, & Tuschl (2001) RNA interference is mediated by 21- and 22-nucleotide RNAs, Genes Dev. 15:188, FIG. 1.

[0009] The interference effect can be long lasting and may be detectable after many cell divisions. Moreover, RNAi exhibits sequence specificity. Kisielow, M. et al. (2002) Isoform-specific knockdown and expression of adaptor protein ShcA using small interfering RNA, J. Biochem. 363:1-5. Thus, the RNAi machinery can specifically knock down one type of transcript, while not affecting closely related mRNA. These properties make siRNA a potentially valuable tool for inhibiting gene expression and studying gene function and drug target validation. Moreover, siRNAs are potentially useful as therapeutic agents against: (1) diseases that are caused by over-expression or misexpression of genes; and (2) diseases brought about by expression of genes that contain mutations.

[0010] Successful siRNA-dependent gene silencing depends on a number of factors. One of the most contentious issues in RNAi is the question of the necessity of siRNA design, i.e., considering the sequence of the siRNA used. Early work in C. elegans and plants circumvented the issue of design by introducing long dsRNA (see, for instance, Fire, A. et al. (1998) Nature 391:806-811). In this primitive organism, long dsRNA molecules are cleaved into siRNA by Dicer, thus generating a diverse population of duplexes that can potentially cover the entire transcript. While some fraction of these molecules are non-functional (i.e., induce little or no silencing) one or more have the potential to be highly functional, thereby silencing the gene of interest and alleviating the need for siRNA design. Unfortunately, due to the interferon response, this same approach is unavailable for mammalian systems. While this effect can be circumvented by bypassing the Dicer cleavage step and directly introducing siRNA, this tactic carries with it the risk that the chosen siRNA sequence may be non-functional or semi-functional.

[0011] A number of researches have expressed the view that siRNA design is not a crucial element of RNAi. On the other hand, others in the field have begun to explore the possibility that RNAi can be made more efficient by paying attention to the design of the siRNA. Unfortunately, none of the reported methods have provided a satisfactory scheme for reliably selecting siRNA with acceptable levels of functionality. Accordingly, there is a need to develop rational criteria by which to select siRNA with an acceptable level of functionality, and to identify siRNA that have this improved level of functionality, as well as to identify siRNAs that are hyperfunctional.

### SUMMARY OF THE INVENTION

[0012] The present invention is directed to increasing the efficiency of RNAi, particularly in mammalian systems. Accordingly, the present invention provides kits, siRNAs and methods for increasing siRNA efficacy.

[0013] According to a first embodiment, the present invention provides a kit for gene silencing, wherein said kit is comprised of a pool of at least two siRNA duplexes, each of which is comprised of a sequence that is complementary to a portion of the sequence of one or more target messenger RNA, and each of which is selected using non-target specific criteria.

[0014] According to a second embodiment, the present invention provides a method for selecting an siRNA, said method comprising applying selection criteria to a set of potential siRNA that comprise 18-30 base pairs, wherein said selection criteria are non-target specific criteria, and said set comprises at least two siRNAs and each of said at least two siRNAs contains a sequence that is at least substantially complementary to a target gene; and determining the relative functionality of the at least two siRNAs.

[0015] According to a third embodiment, the present invention also provides a method for selecting an siRNA wherein said selection criteria are embodied in a formula comprising:
(−14)*G₁₃−13*A₁−12*U₇−11*U₂−10*A₁₁−10*U₄−10*C₃−10*C₅−10*C₆−9*A₁₀−
9*U₉−9*C₁₈−8*G₁₀−7*U₁−7*U₁₆−7*C₁₉+7*U₁₇+8*A₂+8*A₄+8*A₅+8*C₄
+9*G₈+10*A₇+10*U₁₈+11*A₁₉+11*C₉+15*G₁+18*A₃+19*U₁₀−Tm−3*(GCₜₒₜₐₗ)
−6*(GC₁₅₋₁₉)−30*X; or Formula VIII
(−8)*A1+(−1)*A2+(12)*A3+(7)*A4+(18)*A5+(12)*A6+
(19)*A7+(6)*A8+(−4)*A9+(−5)*A10+(−2)*A11+(−5)*A12+(17)*A13+(−
3)*A14+(4)*A15+(2)*A16+(8)*A17+(11)*A18+(30)*A19+(−13)*U1+(−
10)*U2+(2)*U3+(−2)*U4+(−5)*U5+(5)*U6+(−2)*U7+(−10)*U8+(−
5)*U9+(15)*U10+(−1)*U11+(0)*U12+(10)*U13+(−9)*U14+(−13)*U15+(−
10)*U16+(3)*U17+(9)*U18+(9)*U19+(7)*C1+(3)*C2+(−21)*C3+(5)*C4+(−
9)*C5+(−20)*C6+(−18)*C7+(−5)*C8+(5)*C9+(1)*C10+(2)*C11+(−
5)*C12+(−3)*C13+(−6)*C14+(−2)*C15+(−5)*C16+(−3)*C17+(−12)*C18+(−
18)*C19+(14)*G1+(8)*G2+(7)*G3+(−10)*G4+(−
4)*G5+(2)*G6+(1)*G7+(9)*G8+(5)*G9+(−11)*G10+(1)*G11+(9)*G12+(−
24)*G13+(18)*G14+(11)*G15+(13)*G16+(−7)*G17+(−9)*G18+(−22)*G19+
6*(number of A+U in position 15-19)−3*(number of G+C in whole siRNA), Formula X
wherein position numbering begins at the 5′-most position of a sense strand, and
A₁=1 if A is the base at position 1 of the sense strand, otherwise its value is 0;
A₂=1 if A is the base at position 2 of the sense strand, otherwise its value is 0;
A₃=1 if A is the base at position 3 of the sense strand, otherwise its value is 0;
A₄=1 if A is the base at position 4 of the sense strand, otherwise its value is 0;
A₅=1 if A is the base at position 5 of the sense strand, otherwise its value is 0;
A₆=1 if A is the base at position 6 of the sense strand, otherwise its value is 0;
A₇=1 if A is the base at position 7 of the sense strand, otherwise its value is 0;
A₁₀=1 if A is the base at position 10 of the sense strand, otherwise its value is 0;
A₁₁=1 if A is the base at position 11 of the sense strand, otherwise its value is 0;
A₁₃=1 if A is the base at position 13 of the sense strand, otherwise its value is 0;
A₁₉=1 if A is the base at position 19 of the sense strand, otherwise if another base is present or the sense strand is only 18 base pairs in length, its value is 0;
C₃=1 if C is the base at position 3 of the sense strand, otherwise its value is 0;
C₄=1 if C is the base at position 4 of the sense strand, otherwise its value is 0;
C₅=1 if C is the base at position 5 of the sense strand, otherwise its value is 0;
C₆=1 if C is the base at position 6 of the sense strand, otherwise its value is 0;
C₇=1 if C is the base at position 7 of the sense strand, otherwise its value is 0;
C₉=1 if C is the base at position 9 of the sense strand, otherwise its value is 0;
C₁₇=1 if C is the base at position 17 of the sense strand, otherwise its value is 0;
C₁₈=1 if C is the base at position 18 of the sense strand, otherwise its value is 0;
C₁₉=1 if C is the base at position 19 of the sense strand, otherwise if another base is present or the sense strand is only 18 base pairs in length, its value is 0;
G₁=1 if G is the base at position 1 on the sense strand, otherwise its value is 0;
G₂=1 if G is the base at position 2 of the sense strand, otherwise its value is 0;
G₈=1 if G is the base at position 8 on the sense strand, otherwise its value is 0;
G₁₀=1 if G is the base at position 10 on the sense strand, otherwise its value is 0;
G₁₁=1 if G is the base at position 13 on the sense strand, otherwise its value is 0;
G₁₉=1 if G is the base at position 19 of the sense strand, otherwise if another base is present or the sense strand is only 18 base pairs in length, its value is 0;
U₁=1 if U is the base at position 1 on the sense strand, otherwise its value is 0;
U₂=1 if U is the base at position 2 on the sense strand, otherwise its value is 0;
U₃=1 if U is the base at position 3 on the sense strand, otherwise its value is 0;
U₄=1 if U is the base at position 4 on the sense strand, otherwise its value is 0;
U₇=1 if U is the base at position 7 on the sense strand, otherwise its value is 0;
U₉=1 if U is the base at position 9 on the sense strand, otherwise its value is 0;
U₁₀=1 if U is the base at position 10 on the sense strand, otherwise its value is 0;
U₁₅=1 if U is the base at position 15 on the sense strand, otherwise its value is 0;
U₁₆=1 if U is the base at position 16 on the sense strand, otherwise its value is 0;
U₁₇=1 if U is the base at position 17 on the sense strand, otherwise its value is 0;
U₁₈=1 if U is the base at position 18 on the sense strand, otherwise its value is 0.
GC₁₅₋₁₉=the number of G and C bases within positions 15-19 of the sense strand, or within positions 15-18 if the sense strand is only 18 base pairs in length;
GCₜₒₜₐₗ=the number of G and C bases in the sense strand;
Tm=100 if the siRNA oligo has the internal repeat longer then 4 base pairs, otherwise its value is 0; and
X=the number of times that the same nucleotide repeats four or more times in a row.

[0016] According to a fourth embodiment, the invention provides a method for developing an algorithm for selecting siRNA, said method comprising: (a) selecting a set of siRNA; (b) measuring gene silencing ability of each siRNA from said set; (c) determining relative functionality of each siRNA; (d) determining improved functionality by the presence or absence of at least one variable selected from the group consisting of the presence or absence of a particular nucleotide at a particular position, the total number of As and Us in positions 15-19, the number of times that the same nucleotide repeats within a given sequence, and the total number of Gs and Cs; and (e) developing an algorithm using the information of step (d).

[0017] According to a fifth embodiment, the present invention provides a kit, wherein said kit is comprised of at least two siRNAs, wherein said at least two siRNAs comprise a first optimized siRNA and a second optimized siRNA, wherein said first optimized siRNA and said second optimized siRNA are optimized according a formula comprising Formula X.

[0018] The present invention also provides a method for identifying a hyperfunctional siRNA, comprising applying selection criteria to a set of potential siRNA that comprise 18-30 base pairs, wherein said selection criteria are non-target specific criteria, and said set comprises at least two siRNAs and each of said at least two siRNAs contains a sequence that is at least substantially complementary to a target gene; determining the relative functionality of the at least two siRNAs and assigning each of the at least two siRNAs a functionality score; and selecting siRNAs from the at least two siRNAs that have a functionality score that reflects greater than 80 percent silencing at a concentration in the picomolar range, wherein said greater than 80 percent silencing endures for greater than 120 hours.

[0019] According to a sixth embodiment, the present invention provides a hyperfunctional siRNA that is capable of silencing Bcl2.

[0020] According to a seventh embodiment, the present invention provides a method for developing an siRNA algorithm for selecting functional and hyperfunctional siRNAs for a given sequence. The method comprises:

[0021] (a) selecting a set of siRNAs;

[0022] (b) measuring the gene silencing ability of each siRNA from said set;

[0023] (c) determining the relative functionality of each siRNA;

[0024] (d) determining the amount of improved functionality by the presence or absence of at least one variable selected from the group consisting of the total GC content, melting temperature of the siRNA, GC content at positions 15-19, the presence or absence of a particular nucleotide at a particular position, relative thermodynamic stability at particular positions in a duplex, and the number of times that the same nucleotide repeats within a given sequence; and

[0025] (e) developing an algorithm using the information of step (d).

[0026] According to this embodiment, preferably the set of siRNAs comprises at least 90 siRNAs from at least one gene, more preferably at least 180 siRNAs from at least two different genes, and most preferably at least 270 and 360 siRNAs from at least three and four different genes, respectively. Additionally, in step (d) the determination is made with preferably at least two, more preferably at least three, even more preferably at least four, and most preferably all of the variables. The resulting algorithm is not target sequence specific.

[0027] In another embodiment, the present invention provides rationally designed siRNAs identified using the formulas above.

[0028] In yet another embodiment, the present invention is directed to hyperfunctional siRNA.

[0029] The ability to use the above algorithms, which are not sequence or species specific, allows for the cost-effective selection of optimized siRNAs for specific target sequences. Accordingly, there will be both greater efficiency and reliability in the use of siRNA technologies.

[0030] In various embodiments, siRNAs that target nucleotide sequences for ubiquitin ligases are provided. In various embodiments, the siRNAs are rationally designed. In various embodiments, the siRNAs are functional or hyperfunctional.

[0031] In various embodiments, an siRNA that targets nucleotide sequence for an ubiquitin ligase is provided, wherein the siRNA is selected from the group consisting of various siRNA sequences targeting nucleotide sequences for ubiquitin ligases that are disclosed herein. In various embodiments, the siRNA sequence is selected from the group consisting of SEQ ID NO. 438 to SEQ ID NO. 16501.

[0032] In various embodiments, siRNA comprising a sense region and an antisense region are provided, said sense region and said antisense region together form a duplex region comprising 18-30 base pairs, and said sense region comprises a sequence that is at least 90% similar to a sequence selected from the group consisting of siRNA sequences targeting nucleotide sequences for ubiquitin ligases that are disclosed herein. In various embodiments, the siRNA sequence is selected from the group consisting of SEQ ID NO. 438 to SEQ ID NO. 16501.

[0033] In various embodiments, an siRNA comprising a sense region and an antisense region is provided, said sense region and said antisense region together form a duplex region comprising 18-30 base pairs, and said sense region comprises a sequence that is identical to a contiguous stretch of at least 18 bases of a sequence selected from the group consisting of SEQ ID NO. 438 to SEQ ID NO. 16501. In various embodiments, the duplex region is 19-30 base pairs, and the sense region comprises a sequence that is identical to a sequence selected from the group consisting of SEQ ID NO. 438 to SEQ ID NO. 16501.

[0034] In various embodiments, a pool of at least two siRNAs is provided, wherein said pool comprises a first siRNA and a second siRNA, said first siRNA comprising a duplex region of length 18-30 base pairs that has a first sense region that is at least 90% similar to 18 bases of a first sequence selected from the group consisting of SEQ ID NO. 438 to SEQ ID NO. 16501, and said second siRNA comprises a duplex region of length 18-30 base pairs that has a second sense region that is at least 90% similar to 18 bases of a second sequence selected from the group consisting of SEQ ID NO. 438 to SEQ ID NO. 16501, wherein said first sense region and said second sense region are not identical.

[0035] In various embodiments, the first sense region comprises a sequence that is identical to at least 18 bases of a sequence selected from the group consisting of SEQ ID NO. 438 to SEQ ID NO. 16501, and said second sense region comprises a sequence that is identical to at least 18 bases of a sequence selected from the group consisting of SEQ ID NO. 438 to SEQ ID NO. 16501. In various embodiments, the duplex of said first siRNA is 19-30 base pairs, and said first sense region comprises a sequence that is at least 90% similar to a sequence selected from the group consisting of SEQ ID NO. 438 to SEQ ID NO. 16501, and said duplex of said second siRNA is 19-30 base pairs and comprises a sequence that is at least 90% similar to a sequence selected from the group consisting of SEQ ID NO. 438 to SEQ ID NO. 16501.

[0036] In various embodiments, the duplex of said first siRNA is 19-30 base pairs and said first sense region comprises a sequence that is identical to at least 18 bases of a sequence selected from the group consisting of SEQ ID NO. 438 to SEQ ID NO. 16501, and said duplex of said second siRNA is 19-30 base pairs and said second region comprises a sequence that is identical to a sequence selected from the group consisting of SEQ ID NO. 438 to SEQ ID NO. 16501.

[0037] For a better understanding of the present invention together with other and further advantages and embodiments, reference is made to the following description taken in conjunction with the examples, the scope of which is set forth in the appended claims.

### BRIEF DESCRIPTION OF THE FIGURES

[0038] FIG. 1 shows a model for siRNA-RISC interactions. RISC has the ability to interact with either end of the siRNA or miRNA molecule. Following binding, the duplex is unwound, and the relevant target is identified, cleaved, and released.

[0039] FIG. 2 is a representation of the functionality of two hundred and seventy siRNA duplexes that were generated to target human cyclophilin, human diazepam-binding inhibitor (DB), and firefly luciferase.

[0040] FIG. 3a is a representation of the silencing effect of 30 siRNAs in three different cells lines, HEK293, DU145, and Hela. FIG. 3b shows the frequency of different functional groups (>95% silencing (black), >80% silencing (gray), >50% silencing (dark gray), and <50% silencing (white)) based on GC content. In cases where a given bar is absent from a particular GC percentage, no siRNA were identified for that particular group. FIG. 3c shows the frequency of different functional groups based on melting temperature (Tm).

[0041] FIG. 4 is a representation of a statistical analysis that revealed correlations between silencing and five sequence-related properties of siRNA: (A) an A at position 19 of the sense strand, (B) an A at position 3 of the sense strand, (C) a U at position 10 of the sense strand, (D) a base other than G at position 13 of the sense strand, and (E) a base other than C at position 19 of the sense strand. All variables were correlated with siRNA silencing of firefly luciferase and human cyclophilin. siRNAs satisfying the criterion are grouped on the left (Selected) while those that do not, are grouped on the right (Eliminated). Y-axis is “% Silencing of Control.” Each position on the X-axis represents a unique siRNA.

[0042] FIGS. 5A and 5B are representations of firefly luciferase and cyclophilin siRNA panels sorted according to functionality and predicted values using Formula VIII. The siRNA found within the circle represent those that have Formula VIII values (SMARTSCORES™, or siRNA rank) above zero. siRNA outside the indicated area have calculated Formula VIII values that are below zero. Y-axis is “Expression (% Control).” Each position on the X-axis represents a unique siRNA.

[0043] FIG. 6A is a representation of the average internal stability profile (AISP) derived from 270 siRNAs taken from three separate genes (cyclophilin B, DBI and firefly luciferase). Graphs represent AISP values of highly functional, functional, and non-functional siRNA. FIG. 6B is a comparison between the AISP of naturally derived GFP siRNA (filled squares) and the AISP of siRNA from cyclophilin B, DBI, and luciferase having >90% silencing properties (no fill) for the antisense strand. “DG” is the symbol for ΔG, free energy.

[0044] FIG. 7 is a histogram showing the differences in duplex functionality upon introduction of base pair mismatches. The X-axis shows the mismatch introduced in the siRNA and the position it is introduced (e.g., 8C>A reveals that position 8 (which normally has a C) has been changed to an A). The Y-axis is “% Silencing (Normalized to Control).” The samples on the X-axis represent siRNAs at 100 nM and are, reading from left to right: 1A to C, 1A to G, 1A to U; 2A to C, 2A to G, 2A to U; 3A to C, 3A to G, 3A to U; 4G to A, 4G to C; 4G to U; 5U to A, 5U to C, 5U to G; 6U to A, 6U to C, 6U to G; 7G to A, 7G to C, 7G to U; 8C to A, 8C to G, 8C to U; 9G to A, 9G to C, 9G to U; 10C to A, 10C to G, 10C to U; 11G to A, 11G to C, 11G to U; 12G to A, 12G to C, 12G to U; 13A to C, 13A to G, 13A to U; 14G to A, 14G to C, 14G to U; 15G to A, 15G to C, 15G to U; 16A to C, 16A to G, 16A to U; 17G to A, 17G to C, 17G to U; 18U to A, 18U to C, 18U to G; 19U to A, 19U to C, 19U to G; 20 wt; Control.

[0045] FIG. 8 is histogram that shows the effects of 5′sense and antisense strand modification with 2′-O-methylation on functionality.

[0046] FIG. 9 shows a graph of SMARTSCORES™, or siRNA rank, versus RNAi silencing values for more than 360 siRNA directed against 30 different genes. SiRNA to the right of the vertical bar represent those siRNA that have desirable SMARTSCORES™, or siRNA rank.

[0047] FIGS. 10A-E compare the RNAi of five different genes (SEAP, DBI, PLK, Firefly Luciferase, and Renilla Luciferase) by varying numbers of randomly selected siRNA and four rationally designed (SMART-selected) siRNA chosen using the algorithm described in Formula VIII. In addition, RNAi induced by a pool of the four SMART-selected siRNA is reported at two different concentrations (100 and 400 nM). 10F is a comparison between a pool of randomly selected EGFR siRNA (Pool 1) and a pool of SMART-selected EGFR siRNA (Pool 2). Pool 1, S1-S4 and Pool 2 S1-S4 represent the individual members that made up each respective pool. Note that numbers for random siRNAs represent the position of the 5′ end of the sense strand of the duplex. The Y-axis represents the % expression of the control(s). The X-axis is the percent expression of the control.

[0048] FIG. 11 shows the Western blot results from cells treated with siRNA directed against twelve different genes involved in the clathrin-dependent endocytosis pathway (CHC, DynII, CALM, CLCa, CLCb, Eps15, Eps15R, Rab5a, Rab5b, Rab5c, β2 subunit of AP-2 and EEA.1). siRNA were selected using Formula VIII. “Pool” represents a mixture of duplexes 1-4. Total concentration of each siRNA in the pool is 25 nM. Total concentration=4×25=100 nM.

[0049] FIG. 12 is a representation of the gene silencing capabilities of rationally-selected siRNA directed against ten different genes (human and mouse cyclophilin, C-myc, human lamin A/C, QB (ubiquinol-cytochrome c reductase core protein 1), MEK1 and MEK2, ATE1 (arginyl-tRNA protein transferase), GAPDH, and Eg5). The Y-axis is the percent expression of the control. Numbers 1, 2, 3 and 4 represent individual rationally selected siRNA. “Pool” represents a mixture of the four individual siRNA.

[0050] FIG. 13 is the sequence of the top ten Bcl2 siRNAs as determined by Formula VIII. Sequences are listed 5′ to 3′.

[0051] FIG. 14 is the knockdown by the top ten Bcl2 siRNAs at 100 nM concentrations. The Y-axis represents the amount of expression relative to the non-specific (ns) and transfection mixture control.

[0052] FIG. 15 represents a functional walk where siRNA beginning on every other base pair of a region of the luciferase gene are tested for the ability to silence the luciferase gene. The Y-axis represents the percent expression relative to a control. The X-axis represents the position of each individual siRNA. Reading from left to right across the X-axis, the position designations are 1, 3, 5, 7, 9, 11, 13, 15, 17, 19, 21, 23, 25, 27, 29, 31, 33, 35, 37, 39, 41, 43, 45, 47, 49, 51, 53, 55, 57, 59, 61, 63, 65, 67, 69, 71, 73, 75, 77, 79, 81, 83, 85, 87, 89, and Plasmid.

[0053] FIGS. 16A and 16B are histograms demonstrating the inhibition of target gene expression by pools of 2 (16A) and 3 (16B) siRNA duplexes taken from the walk described in FIG. 15. The Y-axis in each represents the percent expression relative to control. The X-axis in each represents the position of the first siRNA in paired pools, or trios of siRNAs. For instance, the first paired pool contains siRNAs 1 and 3. The second paired pool contains siRNAs 3 and 5. Pool 3 (of paired pools) contains siRNAs 5 and 7, and so on. For each of 16A and 16B, the X-axis from left to right reads 1, 3, 5, 7, 9, 11, 13, 15, 17, 19, 21, 23, 25, 27, 29, 31, 33, 35, 37, 39, 41, 43, 45, 47, 49, 51, 53, 55, 57, 59, 61, 63, 65, 67, 69, 71, 73, 75, 77, 79, 81, 83, 85, 87, 89, and Plasmid.

[0054] FIGS. 17A and 17B are histograms demonstrating the inhibition of target gene expression by pools of 4 (17A) and 5 (17B) siRNA duplexes. The Y-axis in each represents the percent expression relative to control. The X-axis in each represents the position of the first siRNA in each pool. For each of 17A and 17B, the X-axis from left to right reads 1, 3, 5, 7, 9, 11, 13, 15, 17, 19, 21, 23, 25, 27, 29, 31, 33, 35, 37, 39, 41, 43, 45, 47, 49, 51, 53, 55, 57, 59, 61, 63, 65, 67, 69, 71, 73, 75, 77, 79, 81, 83, 85, 87, 89, and Plasmid.

[0055] FIGS. 18A and 18B are histograms demonstrating the inhibition of target gene expression by siRNAs that are ten (18A) and twenty (18B) base pairs base pairs apart. The Y-axis represents the percent expression relative to a control. The X-axis represents the position of the first siRNA in each pool. For each of 18A and 18B, the X-axis from left to right reads 1, 3, 5, 7, 9, 11, 13, 15, 17, 19, 21, 23, 25, 27, 29, 31, 33, 35, 37, 39, 41, 43, 45, 47, 49, 51, 53, 55, 57, 59, 61, 63, 65, 67, 69, 71, 73, 75, 77, 79, 81, 83, 85, 87, 89, and Plasmid.

[0056] FIG. 19 shows that pools of siRNAs (dark gray bar) work as well (or better) than the best siRNA in the pool (light gray bar). The Y-axis represents the percent expression relative to a control. The X-axis represents the position of the first siRNA in each pool. The X-axis from left to right reads 1, 3, 5, 7, 9, 11, 13, 15, 17, 19, 21, 23, 25, 27, 29, 31, 33, 35, 37, 39, 41, 43, 45, 47, 49, 51, 53, 55, 57, 59, 61, 63, 65, 67, 69, 71, 73, 75, 77, 79, 81, 83, 85, 87, 89, and Plasmid.

[0057] FIG. 20 shows that the combination of several semifunctional siRNAs (dark gray) result in a significant improvement of gene expression inhibition over individual (semi-functional; light gray) siRNA. The Y-axis represents the percent expression relative to a control.

[0058] FIGS. 21A, 21B and 21C show both pools (Library, Lib) and individual siRNAs in inhibition of gene expression of Beta-Galactosidase, Renilla Luciferase and SEAP (alkaline phosphatase). Numbers on the X-axis indicate the position of the 5′-most nucleotide of the sense strand of the duplex. The Y-axis represents the percent expression of each gene relative to a control. Libraries contain 19 nucleotide long siRNAs (not including overhangs) that begin at the following nucleotides: SEAP: Lib 1: 206, 766, 812, 923, Lib 2: 1117, 1280, 1300, 1487, Lib 3: 206, 766, 812, 923, 1117, 1280, 1300, 1487, Lib 4: 206, 812, 1117, 1300, Lib 5: 766, 923, 1280, 1487, Lib 6: 206, 1487; Bgal: Lib 1: 979, 1339, 2029, 2590, Lib 2: 1087, 1783, 2399, 3257, Lib 3: 979, 1783, 2590, 3257, Lib 4: 979, 1087, 1339, 1783, 2029, 2399, 2590, 3257, Lib 5: 979, 1087, 1339, 1783, Lib 6: 2029, 2399, 2590, 3257; Renilla: Lib 1: 174, 300, 432, 568, Lib 2: 592, 633, 729, 867, Lib 3: 174, 300, 432, 568, 592, 633, 729, 867, Lib 4: 174, 432, 592, 729, Lib 5: 300, 568, 633, 867, Lib 6: 592, 568.

[0059] FIG. 22 shows the results of an EGFR and TfnR internalization assay when single gene knockdowns are performed. The Y-axis represents percent internalization relative to control.

[0060] FIG. 23 shows the results of an EGFR and TfnR internalization assay when multiple genes are knocked down (e.g., Rab5a, b, c). The Y-axis represents the percent internalization relative to control.

[0061] FIG. 24 shows the simultaneous knockdown of four different genes. siRNAs directed against G6PD, GAPDH, PLK, and UQC were simultaneously introduced into cells. Twenty-four hours later, cultures were harvested and assayed for mRNA target levels for each of the four genes. A comparison is made between cells transfected with individual siRNAs vs. a pool of siRNAs directed against all four genes.

[0062] FIG. 25 shows the functionality of ten siRNAs at 0.3 nM concentrations.

### DETAILED DESCRIPTION

### Definitions

[0063] Unless stated otherwise, the following terms and phrases have the meanings provided below:

Complementary

[0064] The term “complementary” refers to the ability of polynucleotides to form base pairs with one another. Base pairs are typically formed by hydrogen bonds between nucleotide units in antiparallel polynucleotide strands. Complementary polynucleotide strands can base pair in the Watson-Crick manner (e.g., A to T, A to U, C to G), or in any other manner that allows for the formation of duplexes. As persons skilled in the art are aware, when using RNA as opposed to DNA, uracil rather than thymine is the base that is considered to be complementary to adenosine. However, when a U is denoted in the context of the present invention, the ability to substitute a T is implied, unless otherwise stated.

[0065] Perfect complementarity or 100% complementarity refers to the situation in which each nucleotide unit of one polynucleotide strand can hydrogen bond with a nucleotide unit of a second polynucleotide strand. Less than perfect complementarity refers to the situation in which some, but not all, nucleotide units of two strands can hydrogen bond with each other. For example, for two 20-mers, if only two base pairs on each strand can hydrogen bond with each other, the polynucleotide strands exhibit 10% complementarity. In the same example, if 18 base pairs on each strand can hydrogen bond with each other, the polynucleotide strands exhibit 90% complementarity.

Deoxynucleotide

[0066] The term “deoxynucleotide” refers to a nucleotide or polynucleotide lacking a hydroxyl group (OH group) at the 2′ and/or 3′ position of a sugar moiety. Instead, it has a hydrogen bonded to the 2′ and/or 3′ carbon. Within an RNA molecule that comprises one or more deoxynucleotides, “deoxynucleotide” refers to the lack of an OH group at the 2′ position of the sugar moiety, having instead a hydrogen bonded directly to the 2′ carbon.

Deoxyribonucleotide

[0067] The terms “deoxyribonucleotide” and “DNA” refer to a nucleotide or polynucleotide comprising at least one sugar moiety that has an H, rather than an OH, at its 2′ and/or 3′position.

Duplex Region

[0068] The phrase “duplex region” refers to the region in two complementary or substantially complementary polynucleotides that form base pairs with one another, either by Watson-Crick base pairing or any other manner that allows for a stabilized duplex between polynucleotide strands that are complementary or substantially complementary. For example, a polynucleotide strand having 21 nucleotide units can base pair with another polynucleotide of 21 nucleotide units, yet only 19 bases on each strand are complementary or substantially complementary, such that the “duplex region” has 19 base pairs. The remaining bases may, for example, exist as 5′ and 3′ overhangs. Further, within the duplex region, 100% complementarity is not required; substantial complementarity is allowable within a duplex region. Substantial complementarity refers to 79% or greater complementarity. For example, a mismatch in a duplex region consisting of 19 base pairs results in 94.7% complementarity, rendering the duplex region substantially complementary.

Filters

[0069] The term “filter” refers to one or more procedures that are performed on sequences that are identified by the algorithm. In some instances, filtering includes in silico procedures where sequences identified by the algorithm can be screened to identify duplexes carrying desirable or undesirable motifs. Sequences carrying such motifs can be selected for, or selected against, to obtain a final set with the preferred properties. In other instances, filtering includes wet lab experiments. For instance, sequences identified by one or more versions of the algorithm can be screened using any one of a number of procedures to identify duplexes that have hyperfunctional traits (e.g., they exhibit a high degree of silencing at subnanomolar concentrations and/or exhibit high degrees of silencing longevity).

Gene Silencing

[0070] The phrase “gene silencing” refers to a process by which the expression of a specific gene product is lessened or attenuated. Gene silencing can take place by a variety of pathways. Unless specified otherwise, as used herein, gene silencing refers to decreases in gene product expression that results from RNA interference (RNAi), a defined, though partially characterized pathway whereby small inhibitory RNA (siRNA) act in concert with host proteins (e.g., the RNA induced silencing complex, RISC) to degrade messenger RNA (mRNA) in a sequence-dependent fashion. The level of gene silencing can be measured by a variety of means, including, but not limited to, measurement of transcript levels by Northern Blot Analysis, B-DNA techniques, transcription-sensitive reporter constructs, expression profiling (e.g., DNA chips), and related technologies. Alternatively, the level of silencing can be measured by assessing the level of the protein encoded by a specific gene. This can be accomplished by performing a number of studies including Western Analysis, measuring the levels of expression of a reporter protein that has e.g., fluorescent properties (e.g., GFP) or enzymatic activity (e.g., alkaline phosphatases), or several other procedures.

miRNA

[0071] The term “miRNA” refers to microRNA.

Nucleotide

[0072] The term “nucleotide” refers to a ribonucleotide or a deoxyribonucleotide or modified form thereof, as well as an analog thereof. Nucleotides include species that comprise purines, e.g., adenine, hypoxanthine, guanine, and their derivatives and analogs, as well as pyrimidines, e.g., cytosine, uracil, thymine, and their derivatives and analogs.

[0073] Nucleotide analogs include nucleotides having modifications in the chemical structure of the base, sugar and/or phosphate, including, but not limited to, 5-position pyrimidine modifications, 8-position purine modifications, modifications at cytosine exocyclic amines, and substitution of 5-bromo-uracil; and 2′-position sugar modifications, including but not limited to, sugar-modified ribonucleotides in which the 2′-OH is replaced by a group such as an H, OR, R, halo, SH, SR, NH₂, NHR, NR₂, or CN, wherein R is an alkyl moiety. Nucleotide analogs are also meant to include nucleotides with bases such as inosine, queuosine, xanthine, sugars such as 2′-methyl ribose, non-natural phosphodiester linkages such as methylphosphonates, phosphorothioates and peptides.

[0074] Modified bases refer to nucleotide bases such as, for example, adenine, guanine, cytosine, thymine, uracil, xanthine, inosine, and queuosine that have been modified by the replacement or addition of one or more atoms or groups. Some examples of types of modifications that can comprise nucleotides that are modified with respect to the base moieties include but are not limited to, alkylated, halogenated, thiolated, aminated, amidated, or acetylated bases, individually or in combination. More specific examples include, for example, 5-propynyluridine, 5-propynylcytidine, 6-methyladenine, 6-methylguanine, N,N,-dimethyladenine, 2-propyladenine, 2-propylguanine, 2-aminoadenine, 1-methylinosine, 3-methyluridine, 5-methylcytidine, 5-methyluridine and other nucleotides having a modification at the 5 position, 5-(2-amino)propyl uridine, 5-halocytidine, 5-halouridine, 4-acetylcytidine, I-methyladenosine, 2-methyladenosine, 3-methylcytidine, 6-methyluridine, 2-methylguanosine, 7-methylguanosine, 2,2-dimethylguanosine, 5-methylaminoethyluridine, 5-methyloxyuridine, deazanucleotides such as 7-deaza-adenosine, 6-azouridine, 6-azocytidine, 6-azothymidine, 5-methyl-2-thiouridine, other thio bases such as 2-thiouridine and 4-thiouridine and 2-thiocytidine, dihydrouridine, pseudouridine, queuosine, archaeosine, naphthyl and substituted naphthyl groups, any O- and N-alkylated purines and pyrimidines such as N6-methyladenosine, 5-methylcarbonylmethyluridine, uridine 5-oxyacetic acid, pyridine-4-one, pyridine-2-one, phenyl and modified phenyl groups such as aminophenol or 2,4,6-trimethoxy benzene, modified cytosines that act as G-clamp nucleotides, 8-substituted adenines and guanines, 5-substituted uracils and thymines, azapyrimidines, carboxyhydroxyalkyl nucleotides, carboxyalkylaminoalkyl nucleotides, and alkylcarbonylalkylated nucleotides. Modified nucleotides also include those nucleotides that are modified with respect to the sugar moiety, as well as nucleotides having sugars or analogs thereof that are not ribosyl. For example, the sugar moieties may be, or be based on, mannoses, arabinoses, glucopyranoses, galactopyranoses, 4′-thioribose, and other sugars, heterocycles, or carbocycles.

[0075] The term nucleotide is also meant to include what are known in the art as universal bases. By way of example, universal bases include but are not limited to 3-nitropyrrole, 5-nitroindole, or nebularine. The term “nucleotide” is also meant to include the N3′ to P5′ phosphoramidate, resulting from the substitution of a ribosyl 3′ oxygen with an amine group.

[0076] Further, the term nucleotide also includes those species that have a detectable label, such as for example a radioactive or fluorescent moiety, or mass label attached to the nucleotide.

Off-Target Silencing and Off-Target Interference

[0077] The phrases “off-target silencing” and “off-target interference” are defined as degradation of mRNA other than the intended target mRNA due to overlapping and/or partial homology with secondary mRNA messages.

Polynucleotide

[0078] The term “polynucleotide” refers to polymers of nucleotides, and includes but is not limited to DNA, RNA, DNA/RNA hybrids including polynucleotide chains of regularly and/or irregularly alternating deoxyribosyl moieties and ribosyl moieties (i.e., wherein alternate nucleotide units have an —OH, then and —H, then an —OH, then an —H, and so on at the 2′ position of a sugar moiety), and modifications of these kinds of polynucleotides, wherein the attachment of various entities or moieties to the nucleotide units at any position are included.

Polyribonucleotide

[0079] The term “polyribonucleotide” refers to a polynucleotide comprising two or more modified or unmodified ribonucleotides and/or their analogs. The term “polyribonucleotide” is used interchangeably with the term “oligoribonucleotide.”

Ribonucleotide and Ribonucleic Acid

[0080] The term “ribonucleotide” and the phrase “ribonucleic acid” (RNA), refer to a modified or unmodified nucleotide or polynucleotide comprising at least one ribonucleotide unit. A ribonucleotide unit comprises an hydroxyl group attached to the 2′ position of a ribosyl moiety that has a nitrogenous base attached in N-glycosidic linkage at the 1′ position of a ribosyl moiety, and a moiety that either allows for linkage to another nucleotide or precludes linkage.

siRNA

[0081] The term “siRNA” refers to small inhibitory RNA duplexes that induce the RNA interference (RNAi) pathway. These molecules can vary in length (generally 18-30 base pairs) and contain varying degrees of complementarity to their target mRNA in the antisense strand. Some, but not all, siRNA have unpaired overhanging bases on the 5′ or 3′ end of the sense strand and/or the antisense strand. The term “siRNA” includes duplexes of two separate strands, as well as single strands that can form hairpin structures comprising a duplex region.

[0082] siRNA may be divided into five (5) groups (non-functional, semi-functional, functional, highly functional, and hyper-functional) based on the level or degree of silencing that they induce in cultured cell lines. As used herein, these definitions are based on a set of conditions where the siRNA is transfected into said cell line at a concentration of 100 nM and the level of silencing is tested at a time of roughly 24 hours after transfection, and not exceeding 72 hours after transfection. In this context, “non-functional siRNA” are defined as those siRNA that induce less than 50% (<50%) target silencing. “Semi-functional siRNA” induce 50-79% target silencing. “Functional siRNA” are molecules that induce 80-95% gene silencing. “Highly-functional siRNA” are molecules that induce greater than 95% gene silencing. “Hyperfunctional siRNA” are a special class of molecules. For purposes of this document, hyperfunctional siRNA are defined as those molecules that: (1) induce greater than 95% silencing of a specific target when they are transfected at subnanomolar concentrations (i.e., less than one nanomolar); and/or (2) induce functional (or better) levels of silencing for greater than 96 hours. These relative functionalities (though not intended to be absolutes) may be used to compare siRNAs to a particular target for applications such as functional genomics, target identification and therapeutics.

SMARTSCORE™, or siRNA Rank

[0083] The term “SMARTSCORE™”, or “siRNA rank” refers to a number determined by applying any of the formulas to a given siRNA sequence. The term “SMART-selected” or “rationally selected” or “rational selection” refers to siRNA that have been selected on the basis of their SMARTSCORES™, or siRNA ranking.

Substantially Similar

[0084] The phrase “substantially similar” refers to a similarity of at least 90% with respect to the identity of the bases of the sequence.

Target

[0085] The term “target” is used in a variety of different forms throughout this document and is defined by the context in which it is used. “Target mRNA” refers to a messenger RNA to which a given siRNA can be directed against. “Target sequence” and “target site” refer to a sequence within the mRNA to which the sense strand of an siRNA shows varying degrees of homology and the antisense strand exhibits varying degrees of complementarity. The phrase “siRNA target” can refer to the gene, mRNA, or protein against which an siRNA is directed. Similarly, “target silencing” can refer to the state of a gene, or the corresponding mRNA or protein.

Transfection

[0086] The term “transfection” refers to a process by which agents are introduced into a cell. The list of agents that can be transfected is large and includes, but is not limited to, siRNA, sense and/or anti-sense sequences, DNA encoding one or more genes and organized into an expression plasmid, proteins, protein fragments, and more. There are multiple methods for transfecting agents into a cell including, but not limited to, electroporation, calcium phosphate-based transfections, DEAE-dextran-based transfections, lipid-based transfections, molecular conjugate-based transfections (e.g., polylysine-DNA conjugates), microinjection and others.

[0087] The present invention is directed to improving the efficiency of gene silencing by siRNA. Through the inclusion of multiple siRNA sequences that are targeted to a particular gene and/or selecting an siRNA sequence based on certain defined criteria, improved efficiency may be achieved.

[0088] The present invention will now be described in connection with preferred embodiments. These embodiments are presented in order to aid in an understanding of the present invention and are not intended, and should not be construed, to limit the invention in any way. All alternatives, modifications and equivalents that may become apparent to those of ordinary skill upon reading this disclosure are included within the spirit and scope of the present invention.

[0089] Furthermore, this disclosure is not a primer on RNA interference. Basic concepts known to persons skilled in the art have not been set forth in detail.

[0090] The present invention is directed to increasing the efficiency of RNAi, particularly in mammalian systems. Accordingly, the present invention provides kits, siRNAs and methods for increasing siRNA efficacy.

[0091] According to a first embodiment, the present invention provides a kit for gene silencing, wherein said kit is comprised of a pool of at least two siRNA duplexes, each of which is comprised of a sequence that is complementary to a portion of the sequence of one or more target messenger RNA, and each of which is selected using non-target specific criteria. Each of the at least two siRNA duplexes of the kit complementary to a portion of the sequence of one or more target mRNAs is preferably selected using Formula X.

[0092] According to a second embodiment, the present invention provides a method for selecting an siRNA, said method comprising applying selection criteria to a set of potential siRNA that comprise 18-30 base pairs, wherein said selection criteria are non-target specific criteria, and said set comprises at least two siRNAs and each of said at least two siRNAs contains a sequence that is at least substantially complementary to a target gene; and determining the relative functionality of the at least two siRNAs.

[0093] In one embodiment, the present invention also provides a method wherein said selection criteria are embodied in a formula comprising:
(−14)*G₁₃−13*A₁−12*U₇−11*U₂−10*A₁₁−10*U₄−10*C₃−10*C₅−10*C₆−9*A₁₀−
9*U₉−9*C₁₈−8*G₁₀−7*U₁−7*U₁₆−7*C₁₇−7*C₁₉+7*U₁₇+8*A₂+8*A₄+8*A₅+8*C₄
+9*G₈+10*A₇+10*U₁₈+11*A₁₉+11*C₉+15*G₁+18*A₃+19*U₁₀−Tm−3*(GCₜₒₜₐₗ)−
6*(GC₁₅₋₁₉)−30*X; or Formula VIII
(−8)*A1+(−1)*A2+(12)*A3+(7)*A4+(18)*A5+(12)*A6+
(19)*A7+(6)*A8+(−4)*A9+(−5)*A10+(−2)*A11+(−5)*A12+(17)*A13+(−
3)*A14+(4)*A15+(2)*A16+(8)*A17+(11)*A18+(30)*A19+(−13)*U1+(−
10)*U2+(2)*U3+(−2)*U4+(−5)*U5+(5)*U6+(−2)*U7+(−10)*U8+(−
5)*U9+(15)*U10+(−1)*U11+(0)*U12+(10)*U13+(−9)*U14+(−13)*U15+(−
10)*U16+(3)*U17+(9)*U18+(9)*U19+(7)*C1+(3)*C2+(−21)*C3+(5)*C4+(−
9)*C5+(−20)*C6+(−18)*C7+(−5)*C8+(5)*C9+(1)*C10+(2)*C11+(−
5)*C12+(−3)*C13+(−6)*C14+(−2)*C15+(−5)*C16+(−3)*C17+(−12)*C18+(−
18)*C19+(14)*G1+(8)*G2+(7)*G3+(−10)*G4+(−
4)*G5+(2)*G6+(1)*G7+(9)*G8+(5)*G9+(−11)*G10+(1)*G11+(9)*G12+(−
24)*G13+(18)*G14+(11)*G15+(13)*G16+(−7)*G17+(−9)*G18+(−22)*G19+
6*(number of A+U in position 15-19)−3*(number of G+C in whole siRNA), Formula X

[0094] wherein position numbering begins at the 5′-most position of a sense strand, and

[0095] A₁=1 if A is the base at position 1 of the sense strand, otherwise its value is 0;

[0096] A₂=1 if A is the base at position 2 of the sense strand, otherwise its value is 0;

[0097] A₃=1 if A is the base at position 3 of the sense strand, otherwise its value is 0;

[0098] A₄=1 if A is the base at position 4 of the sense strand, otherwise its value is 0;

[0099] A₅=1 if A is the base at position 5 of the sense strand, otherwise its value is 0;

[0100] A₆=1 if A is the base at position 6 of the sense strand, otherwise its value is 0;

[0101] A₇=1 if A is the base at position 7 of the sense strand, otherwise its value is 0;

[0102] A₁₀=1 if A is the base at position 10 of the sense strand, otherwise its value is 0;

[0103] A₁₁=1 if A is the base at position 11 of the sense strand, otherwise its value is 0;

[0104] A₁₃=1 if A is the base at position 13 of the sense strand, otherwise its value is 0;

[0105] A₁₉=1 if A is the base at position 19 of the sense strand, otherwise if another base is present or the sense strand is only 18 base pairs in length, its value is 0;

[0106] C₃=1 if C is the base at position 3 of the sense strand, otherwise its value is 0;

[0107] C₄=1 if C is the base at position 4 of the sense strand, otherwise its value is 0;

[0108] C₅=1 if C is the base at position 5 of the sense strand, otherwise its value is 0;

[0109] C₆=1 if C is the base at position 6 of the sense strand, otherwise its value is 0;

[0110] C₇=1 if C is the base at position 7 of the sense strand, otherwise its value is 0;

[0111] C₉=1 if C is the base at position 9 of the sense strand, otherwise its value is 0;

[0112] C₁₇=1 if C is the base at position 17 of the sense strand, otherwise its value is 0;

[0113] C₁₈=1 if C is the base at position 18 of the sense strand, otherwise its value is 0;

[0114] C₁₉=1 if C is the base at position 19 of the sense strand, otherwise if another base is present or the sense strand is only 18 base pairs in length, its value is 0;

[0115] G₁=1 if G is the base at position 1 on the sense strand, otherwise its value is 0;

[0116] G₂=1 if G is the base at position 2 of the sense strand, otherwise its value is 0;

[0117] G₈=1 if G is the base at position 8 on the sense strand, otherwise its value is 0;

[0118] G₁₀=1 if G is the base at position 10 on the sense strand, otherwise its value is 0;

[0119] G₁₃=1 if G is the base at position 13 on the sense strand, otherwise its value is 0;

[0120] G₁₉=1 if G is the base at position 19 of the sense strand, otherwise if another base is present or the sense strand is only 18 base pairs in length, its value is 0;

[0121] U₁=1 if U is the base at position 1 on the sense strand, otherwise its value is 0;

[0122] U₂=1 if U is the base at position 2 on the sense strand, otherwise its value is 0;

[0123] U₃=1 if U is the base at position 3 on the sense strand, otherwise its value is 0;

[0124] U₄=1 if U is the base at position 4 on the sense strand, otherwise its value is 0;

[0125] U₇=1 if U is the base at position 7 on the sense strand, otherwise its value is 0;

[0126] U₉=1 if U is the base at position 9 on the sense strand, otherwise its value is 0;

[0127] U₁₀=1 if U is the base at position 10 on the sense strand, otherwise its value is 0;

[0128] U₁₅=1 if U is the base at position 15 on the sense strand, otherwise its value is 0;

[0129] U₁₆=1 if U is the base at position 16 on the sense strand, otherwise its value is 0;

[0130] U₁₇=1 if U is the base at position 17 on the sense strand, otherwise its value is 0;

[0131] U₁₈=1 if U is the base at position 18 on the sense strand, otherwise its value is 0.

[0132] GC₁₅₋₁₉=the number of G and C bases within positions 15-19 of the sense strand, or within positions 15-18 if the sense strand is only 18 base pairs in length;

[0133] GCₜₒₜₐₗ=the number of G and C bases in the sense strand;

[0134] Tm=100 if the siRNA oligo has the internal repeat longer then 4 base pairs, otherwise its value is 0; and

[0135] X=the number of times that the same nucleotide repeats four or more times in a row.

[0136] Any of the methods of selecting siRNA in accordance with the invention can further comprise comparing the internal stability profiles of the siRNAs to be selected, and selecting those siRNAs with the most favorable internal stability profiles. Any of the methods of selecting siRNA can further comprise selecting either for or against sequences that contain motifs that induce cellular stress. Such motifs include, for example, toxicity motifs. Any of the methods of selecting siRNA can further comprise either selecting for or selecting against sequences that comprise stability motifs.

[0137] In another embodiment, the present invention provides a method of gene silencing, comprising introducing into a cell at least one siRNA selected according to any of the methods of the present invention. The siRNA can be introduced by allowing passive uptake of siRNA, or through the use of a vector.

[0138] According to a third embodiment, the invention provides a method for developing an algorithm for selecting siRNA, said method comprising: (a) selecting a set of siRNA; (b) measuring gene silencing ability of each siRNA from said set; (c) determining relative functionality of each siRNA; (d) determining improved functionality by the presence or absence of at least one variable selected from the group consisting of the presence or absence of a particular nucleotide at a particular position, the total number of As and Us in positions 15-19, the number of times that the same nucleotide repeats within a given sequence, and the total number of Gs and Cs; and (e) developing an algorithm using the information of step (d).

[0139] In another embodiment, the invention provides a method for selecting an siRNA with improved functionality, comprising using the above-mentioned algorithm to identify an siRNA of improved functionality.

[0140] According to a fourth embodiment, the present invention provides a kit, wherein said kit is comprised of at least two siRNAs, wherein said at least two siRNAs comprise a first optimized siRNA and a second optimized siRNA, wherein said first optimized siRNA and said second optimized siRNA are optimized according a formula comprising Formula X.

[0141] According to a fifth embodiment, the present invention provides a method for identifying a hyperfunctional siRNA, comprising applying selection criteria to a set of potential siRNA that comprise 18-30 base pairs, wherein said selection criteria are non-target specific criteria, and said set comprises at least two siRNAs and each of said at least two siRNAs contains a sequence that is at least substantially complementary to a target gene; determining the relative functionality of the at least two siRNAs and assigning each of the at least two siRNAs a functionality score; and selecting siRNAs from the at least two siRNAs that have a functionality score that reflects greater than 80 percent silencing at a concentration in the picomolar range, wherein said greater than 80 percent silencing endures for greater than 120 hours.

[0142] In other embodiments, the invention provides kits and/or methods wherein the siRNA are comprised of two separate polynucleotide strands; wherein the siRNA are comprised of a single contiguous molecule such as, for example, a unimolecular siRNA (comprising, for example, either a nucleotide or non-nucleotide loop); wherein the siRNA are expressed from one or more vectors; and wherein two or more genes are silenced by a single administration of siRNA.

[0143] According to a sixth embodiment, the present invention provides a hyperfunctional siRNA that is capable of silencing Bcl2.

[0144] According to a seventh embodiment, the present invention provides a method for developing an siRNA algorithm for selecting functional and hyperfunctional siRNAs for a given sequence. The method comprises:

[0145] (a) selecting a set of siRNAs;

[0146] (b) measuring the gene silencing ability of each siRNA from said set;

[0147] (c) determining the relative functionality of each siRNA;

[0148] (d) determining the amount of improved functionality by the presence or absence of at least one variable selected from the group consisting of the total GC content, melting temperature of the siRNA, GC content at positions 15-19, the presence or absence of a particular nucleotide at a particular position, relative thermodynamic stability at particular positions in a duplex, and the number of times that the same nucleotide repeats within a given sequence; and

[0149] (e) developing an algorithm using the information of step (d).

[0150] According to this embodiment, preferably the set of siRNAs comprises at least 90 siRNAs from at least one gene, more preferably at least 180 siRNAs from at least two different genes, and most preferably at least 270 and 360 siRNAs from at least three and four different genes, respectively. Additionally, in step (d) the determination is made with preferably at least two, more preferably at least three, even more preferably at least four, and most preferably all of the variables. The resulting algorithm is not target sequence specific.

[0151] In another embodiment, the present invention provides rationally designed siRNAs identified using the formulas above.

[0152] In yet another embodiment, the present invention is directed to hyperfunctional siRNA.

[0153] The ability to use the above algorithms, which are not sequence or species specific, allows for the cost-effective selection of optimized siRNAs for specific target sequences. Accordingly, there will be both greater efficiency and reliability in the use of siRNA technologies.

[0154] The methods disclosed herein can be used in conjunction with comparing internal stability profiles of selected siRNAs, and designing an siRNA with a desirable internal stability profile; and/or in conjunction with a selection either for or against sequences that contain motifs that induce cellular stress, for example, cellular toxicity.

[0155] Any of the methods disclosed herein can be used to silence one or more genes by introducing an siRNA selected, or designed, in accordance with any of the methods disclosed herein. The siRNA(s) can be introduced into the cell by any method known in the art, including passive uptake or through the use of one or more vectors.

[0156] Any of the methods and kits disclosed herein can employ either unimolecular siRNAs, siRNAs comprised of two separate polynucleotide strands, or combinations thereof. Any of the methods disclosed herein can be used in gene silencing, where two or more genes are silenced by a single administration of siRNA(s). The siRNA(s) can be directed against two or more target genes, and administered in a single dose or single transfection, as the case may be.

Optimizing siRNA

[0157] According to one embodiment, the present invention provides a method for improving the effectiveness of gene silencing for use to silence a particular gene through the selection of an optimal siRNA. An siRNA selected according to this method may be used individually, or in conjunction with the first embodiment, i.e., with one or more other siRNAs, each of which may or may not be selected by this criteria in order to maximize their efficiency.

[0158] The degree to which it is possible to select an siRNA for a given mRNA that maximizes these criteria will depend on the sequence of the mRNA itself. However, the selection criteria will be independent of the target sequence. According to this method, an siRNA is selected for a given gene by using a rational design. That said, rational design can be described in a variety of ways. Rational design is, in simplest terms, the application of a proven set of criteria that enhance the probability of identifying a functional or hyperfunctional siRNA. In one method, rationally designed siRNA can be identified by maximizing one or more of the following criteria:

[0159] (1) A low GC content, preferably between about 30-52%.

[0160] (2) At least 2, preferably at least 3 A or U bases at positions 15-19 of the siRNA on the sense strand.

[0161] (3) An A base at position 19 of the sense strand.

[0162] (4) An A base at position 3 of the sense strand.

[0163] (5) A U base at position 10 of the sense strand.

[0164] (6) An A base at position 14 of the sense strand.

[0165] (7) A base other than C at position 19 of the sense strand.

[0166] (8) A base other than G at position 13 of the sense strand.

[0167] (9) A Tm, which refers to the character of the internal repeat that results in inter- or intramolecular structures for one strand of the duplex, that is preferably not stable at greater than 50° C., more preferably not stable at greater than 37° C., even more preferably not stable at greater than 30° C. and most preferably not stable at greater than 20° C.

[0168] (10) A base other than U at position 5 of the sense strand.

[0169] (11) A base other than A at position 11 of the sense strand.

[0170] (12) A base other than an A at position 1 of the sense strand.

[0171] (13) A base other than an A at position 2 of the sense strand.

[0172] (14) An A base at position 4 of the sense strand.

[0173] (15) An A base at position 5 of the sense strand.

[0174] (16) An A base at position 6 of the sense strand.

[0175] (17) An A base at position 7 of the sense strand.

[0176] (18) An A base at position 8 of the sense strand.

[0177] (19) A base other than an A at position 9 of the sense strand.

[0178] (20) A base other than an A at position 10 of the sense strand.

[0179] (21) A base other than an A at position 11 of the sense strand.

[0180] (22) A base other than an A at position 12 of the sense strand.

[0181] (23) An A base at position 13 of the sense strand.

[0182] (24) A base other than an A at position 14 of the sense strand.

[0183] (25) An A base at position 15 of the sense strand

[0184] (26) An A base at position 16 of the sense strand.

[0185] (27) An A base at position 17 of the sense strand.

[0186] (28) An A base at position 18 of the sense strand.

[0187] (29) A base other than a U at position 1 of the sense strand.

[0188] (30) A base other than a U at position 2 of the sense strand.

[0189] (31) A U base at position 3 of the sense strand.

[0190] (32) A base other than a U at position 4 of the sense strand.

[0191] (33) A base other than a U at position 5 of the sense strand.

[0192] (34) A U base at position 6 of the sense strand.

[0193] (35) A base other than a U at position 7 of the sense strand.

[0194] (36) A base other than a U at position 8 of the sense strand.

[0195] (37) A base other than a U at position 9 of the sense strand.

[0196] (38) A base other than a U at position 11 of the sense strand.

[0197] (39) A U base at position 13 of the sense strand.

[0198] (40) A base other than a U at position 14 of the sense strand.

[0199] (41) A base other than a U at position 15 of the sense strand.

[0200] (42) A base other than a U at position 16 of the sense strand.

[0201] (43) A U base at position 17 of the sense strand.

[0202] (44) A U base at position 18 of the sense strand.

[0203] (45) A U base at position 19 of the sense strand.

[0204] (46) A C base at position 1 of the sense strand.

[0205] (47) A C base at position 2 of the sense strand.

[0206] (48) A base other than a C at position 3 of the sense strand.

[0207] (49) A C base at position 4 of the sense strand.

[0208] (50) A base other than a C at position 5 of the sense strand.

[0209] (51) A base other than a C at position 6 of the sense strand.

[0210] (52) A base other than a C at position 7 of the sense strand.

[0211] (53) A base other than a C at position 8 of the sense strand.

[0212] (54) A C base at position 9 of the sense strand.

[0213] (55) A C base at position 10 of the sense strand.

[0214] (56) A C base at position 11 of the sense strand.

[0215] (57) A base other than a C at position 12 of the sense strand.

[0216] (58) A base other than a C at position 13 of the sense strand.

[0217] (59) A base other than a C at position 14 of the sense strand.

[0218] (60) A base other than a C at position 15 of the sense strand.

[0219] (61) A base other than a C at position 16 of the sense strand.

[0220] (62) A base other than a C at position 17 of the sense strand.

[0221] (63) A base other than a C at position 18 of the sense strand.

[0222] (64) A G base at position 1 of the sense strand.

[0223] (65) A G base at position 2 of the sense strand.

[0224] (66) A G base at position 3 of the sense strand.

[0225] (67) A base other than a G at position 4 of the sense strand.

[0226] (68) A base other than a G at position 5 of the sense strand.

[0227] (69) A G base at position 6 of the sense strand.

[0228] (70) A G base at position 7 of the sense strand.

[0229] (71) A G base at position 8 of the sense strand.

[0230] (72) A G base at position 9 of the sense strand.

[0231] (73) A base other than a G at position 10 of the sense strand.

[0232] (74) A G base at position 11 of the sense strand.

[0233] (75) A G base at position 12 of the sense strand.

[0234] (76) A G base at position 14 of the sense strand.

[0235] (77) A G base at position 15 of the sense strand.

[0236] (78) A G base at position 16 of the sense strand.

[0237] (79) A base other than a G at position 17 of the sense strand.

[0238] (80) A base other than a G at position 18 of the sense strand.

[0239] (81) A base other than a G at position 19 of the sense strand.

[0240] The importance of various criteria can vary greatly. For instance, a C base at position 10 of the sense strand makes a minor contribution to duplex functionality. In contrast, the absence of a C at position 3 of the sense strand is very important. Accordingly, preferably an siRNA will satisfy as many of the aforementioned criteria as possible.

[0241] With respect to the criteria, GC content, as well as a high number of AU in positions 15-19 of the sense strand, may be important for easement of the unwinding of double stranded siRNA duplex. Duplex unwinding has been shown to be crucial for siRNA functionality in vivo.

[0242] With respect to criterion 9, the internal structure is measured in terms of the melting temperature of the single strand of siRNA, which is the temperature at which 50% of the molecules will become denatured. With respect to criteria 2-8 and 10-11, the positions refer to sequence positions on the sense strand, which is the strand that is identical to the mRNA.

[0243] In one preferred embodiment, at least criteria 1 and 8 are satisfied. In another preferred embodiment, at least criteria 7 and 8 are satisfied. In still another preferred embodiment, at least criteria 1, 8 and 9 are satisfied.

[0244] It should be noted that all of the aforementioned criteria regarding sequence position specifics are with respect to the 5′ end of the sense strand. Reference is made to the sense strand, because most databases contain information that describes the information of the mRNA. Because according to the present invention a chain can be from 18 to 30 bases in length, and the aforementioned criteria assumes a chain 19 base pairs in length, it is important to keep the aforementioned criteria applicable to the correct bases.

[0245] When there are only 18 bases, the base pair that is not present is the base pair that is located at the 3′ of the sense strand. When there are twenty to thirty bases present, then additional bases are added at the 5′ end of the sense chain and occupy positions ⁻1 to ⁻11. Accordingly, with respect to SEQ. ID NO. 0001 NNANANNNNUCNAANNNNA and SEQ. ID NO. 0028 GUCNNANANNNNUCNAANNNNA, both would have A at position 3, A at position 5, U at position 10, C at position 11, A and position 13, A and position 14 and A at position 19. However, SEQ. ID NO. 0028 would also have C at position −1, U at position −2 and G at position −3.

[0246] For a 19 base pair siRNA, an optimal sequence of one of the strands may be represented below, where N is any base, A, C, G, or U:

| | |
|---|---|
| SEQ. ID NO. 0001 | NNANANNNNUCNAANNNNA. |
| SEQ. ID NO. 0002 | NNANANNNNUGNAANNNNA. |
| SEQ. ID NO. 0003 | NNANANNNNUUNAANNNNA. |
| SEQ. ID NO. 0004 | NNANANNNNUCNCANNNNA. |
| SEQ. ID NO. 0005 | NNANANNNNUGNCANNNNA. |
| SEQ. ID NO. 0006 | NNANANNNNUUNCANNNNA. |
| SEQ. ID NO. 0007 | NNANANNNNUCNUANNNNA. |
| SEQ. ID NO. 0008 | NNANANNNNUGNUANNNNA. |
| SEQ. ID NO. 0009 | NNANANNNNUUNUANNNNA. |
| SEQ. ID NO. 0010 | NNANCNNNNUCNAANNNNA. |
| SEQ. ID NO. 0011 | NNANCNNNNUGNAANNNNA. |
| SEQ. ID NO. 0012 | NNANCNNNNUUNAANNNNA. |
| SEQ. ID NO. 0013 | NNANCNNNNUCNCANNNNA. |
| SEQ. ID NO. 0014 | NNANCNNNNUGNCANNNNA. |
| SEQ. ID NO. 0015 | NNANCNNNNUUNCANNNNA. |
| SEQ. ID NO. 0016 | NNANCNNNNUCNUANNNNA. |
| SEQ. ID NO. 0017 | NNANCNNNNUGNUANNNNA. |
| SEQ. ID NO. 0018 | NNANCNNNNUUNUANNNNA. |
| SEQ. ID NO. 0019 | NNANGNNNNUCNAANNNNA. |
| SEQ. ID NO. 0020 | NNANGNNNNUGNAANNNNA. |
| SEQ. ID NO. 0021 | NNANGNNNNUUNAANNNNA. |
| SEQ. ID NO. 0022 | NNANGNNNNUCNCANNNNA. |
| SEQ. ID NO. 0023 | NNANGNNNNUGNCANNNNA. |
| SEQ. ID NO. 0024 | NNANGNNNNUUNCANNNNA. |
| SEQ. ID NO. 0025 | NNANGNNNNUCNUANNNNA. |
| SEQ. ID NO. 0026 | NNANGNNNNUGNUANNNNA. |
| SEQ. ID NO. 0027 | NNANGNNNNNUNUANNNNA. |

[0247] In one embodiment, the sequence used as an siRNA is selected by choosing the siRNA that score highest according to one of the following seven algorithms that are represented by Formulas I-VII:
Relative functionality of siRNA=−(GC/3)+(AU₁₅₋₁₉)−(Tm_{20° C.})*3−(G₁₃)*3−(C₁₉)+(A₁₉)*2+(A₃)+(U₁₀)+(A₁₄)−(U₅)−(A₁₁) Formula I
Relative functionality of siRNA=−(GC/3)−(AU₁₅₋₁₉)*3−(G₁₃)*3−(C₁₉)+(A₁₉)*2+(A₃) Formula II
Relative functionality of siRNA=−(GC/3)+(AU₁₅₋₁₉)−(Tm_{20° C.})*3 Formula III

[0248] Formula IV

$$Relative functionality of siRNA = - GC / 2 + ( {AU}_{15 - 19} ) / 2 - ( {Tm}_{{20}^{°} C .} ) * 2 - ( {G}_{13} ) * 3 - ( {C}_{19} ) + ( {A}_{19} ) * 2 + ( {A}_{3} ) + ( {U}_{10} ) + ( {A}_{14} ) - ( {U}_{5} ) - ( {A}_{11} )$$

Relative functionality of siRNA=−(G₁₃)*3−(C₁₉)+(A₁₉)*2+(A₃)+(U₁₀)+(A₁₄)−(U₅)−(A₁₁) Formula V
Relative functionality of siRNA=−(G₁₃)*3−(C₁₉)+(A₁₉)*2+(A₃) Formula VI
Relative functionality of siRNA=−(GC/2)+(AU₁₅₋₁₉)/2−(Tm_{20° C.})*1−(G₁₃)*3−(C₁₉)+(A₁₉)*3+(A₃)*3+(U₁₀)/2+(A₁₄)/2−(U₅)/2-(A₁₁)/2 Formula VII

[0249] In Formulas I-VII:

[0250] wherein A₁₉=1 if A is the base at position 19 on the sense strand, otherwise its value is 0,

[0251] AU₁₅₋₁₉=0-5 depending on the number of A or U bases on the sense strand at positions 15-19;

[0252] G₁₃=1 if G is the base at position 13 on the sense strand, otherwise its value is 0;

[0253] C₁₉=1 if C is the base at position 19 of the sense strand, otherwise its value is 0;

[0254] GC=the number of G and C bases in the entire sense strand;

[0255] Tm_{20° C.}=1 if the Tm is greater than 20° C.;

[0256] A₃=1 if A is the base at position 3 on the sense strand, otherwise its value is 0;

[0257] U₁₀=1 if U is the base at position 10 on the sense strand, otherwise its value is 0;

[0258] A₁₄=1 if A is the base at position 14 on the sense strand, otherwise its value is 0;

[0259] U₅=1 if U is the base at position 5 on the sense strand, otherwise its value is 0; and

[0260] A₁₁=1 if A is the base at position 11 of the sense strand, otherwise its value is 0.

[0261] Formulas I-VII provide relative information regarding functionality. When the values for two sequences are compared for a given formula, the relative functionality is ascertained; a higher positive number indicates a greater functionality. For example, in many applications a value of 5 or greater is beneficial.

[0262] Additionally, in many applications, more than one of these formulas would provide useful information as to the relative functionality of potential siRNA sequences. However, it is beneficial to have more than one type of formula, because not every formula will be able to help to differentiate among potential siRNA sequences. For example, in particularly high GC mRNAs, formulas that take that parameter into account would not be useful and application of formulas that lack GC elements (e.g., formulas V and VI) might provide greater insights into duplex functionality. Similarly, formula II might by used in situations where hairpin structures are not observed in duplexes, and formula IV might be applicable for sequences that have higher AU content. Thus, one may consider a particular sequence in light of more than one or even all of these algorithms to obtain the best differentiation among sequences. In some instances, application of a given algorithm may identify an unusually large number of potential siRNA sequences, and in those cases, it may be appropriate to re-analyze that sequence with a second algorithm that is, for instance, more stringent. Alternatively, it is conceivable that analysis of a sequence with a given formula yields no acceptable siRNA sequences (i.e. low SMARTSCORES™, or siRNA ranking). In this instance, it may be appropriate to re-analyze that sequences with a second algorithm that is, for instance, less stringent. In still other instances, analysis of a single sequence with two separate formulas may give rise to conflicting results (i.e. one formula generates a set of siRNA with high SMARTSCORES™, or siRNA ranking, while the other formula identifies a set of siRNA with low SMARTSCORES™, or siRNA ranking). In these instances, it may be necessary to determine which weighted factor(s) (e.g. GC content) are contributing to the discrepancy and assessing the sequence to decide whether these factors should or should not be included. Alternatively, the sequence could be analyzed by a third, fourth, or fifth algorithm to identify a set of rationally designed siRNA.

[0263] The above-referenced criteria are particularly advantageous when used in combination with pooling techniques as depicted in Table I:

TABLE I
FUNCTIONAL PROBABILITY

| | OLIGOS | | | POOLS | | |
|---|---|---|---|---|---|---|
| CRITERIA | >95% | >80% | <70% | >95% | >80% | <70% |
| CURRENT | 33.0 | 50.0 | 23.0 | 79.5 | 97.3 | 0.3 |
| NEW | 50.0 | 88.5 | 8.0 | 93.8 | 99.98 | 0.005 |
| (GC) | 28.0 | 58.9 | 36.0 | 72.8 | 97.1 | 1.6 |

[0264] The term “current” used in Table I refers to Tuschl's conventional siRNA parameters (Elbashir, S. M. et al. (2002) “Analysis of gene function in somatic mammalian cells using small interfering RNAs” Methods 26: 199-213). “New” refers to the design parameters described in Formulas I-VII. “GC” refers to criteria that select siRNA solely on the basis of GC content.

[0265] As Table I indicates, when more functional siRNA duplexes are chosen, siRNAs that produce <70% silencing drops from 23% to 8% and the number of siRNA duplexes that produce >80% silencing rises from 50% to 88.5%. Further, of the siRNA duplexes with >80% silencing, a larger portion of these siRNAs actually silence >95% of the target expression (the new criteria increases the portion from 33% to 50%). Using this new criteria in pooled siRNAs, shows that, with pooling, the amount of silencing >95% increases from 79.5% to 93.8% and essentially eliminates any siRNA pool from silencing less than 70%.

[0266] Table II similarly shows the particularly beneficial results of pooling in combination with the aforementioned criteria. However, Table II, which takes into account each of the aforementioned variables, demonstrates even a greater degree of improvement in functionality.

TABLE II
FUNCTIONAL PROBABILITY

| | OLIGOS | | | POOLS | | |
|---|---|---|---|---|---|---|
| | | | NON- | | | NON- |
| | FUNCTIONAL | AVERAGE | FUNCTIONAL | FUNCTIONAL | AVERAGE | FUNCTIONAL |
| RANDOM | 20 | 40 | 50 | 67 | 97 | 3 |
| CRITERIA 1 | 52 | 99 | 0.1 | 97 | 93 | 0.0040 |
| CRITERIA 4 | 89 | 99 | 0.1 | 99 | 99 | 0.0000 |

[0267] The terms “functional,” “Average,” and “Non-functional” used in Table II, refer to siRNA that exhibit >80%, >50%, and <50% functionality, respectively. Criteria 1 and 4 refer to specific criteria described above.

[0268] The above-described algorithms may be used with or without a computer program that allows for the inputting of the sequence of the mRNA and automatically outputs the optimal siRNA. The computer program may, for example, be accessible from a local terminal or personal computer, over an internal network or over the Internet.

[0269] In addition to the formulas above, more detailed algorithms may be used for selecting siRNA. Preferably, at least one RNA duplex of 18-30 base pairs is selected such that it is optimized according a formula selected from:
(−14)*G₁₃−13*A₁−12*U₇−11*U₂−10*A₁₁−10*U₄−10*C₃−10*C₅−10*C₆−9*A₁₀−
9*U₉−9*C₁₈−8*G₁₀−7*U₁−7*U₁₆−7*C₁₇−7*C₁₉+7*U₁₇+8*A₂+8*A₄+8*A₅+8*C₄
+9*G₈+10*A₇+10*U₁₈+11*A₁₉+11*C₉+15*G₁+18*A₃+19*U₁₀−Tm−3*(GCₜₒₜₐₗ)−
6*(GC₁₅₋₁₉)−30*X; and Formula VIII
(14.1)*A₃+(14.9)*A₆+(17.6)*A₁₃+(24.7)*A₁₉+(14.2)*U₁₀+(10.5)*
C₉+(23.9)*G₁+(16.3)*G₂+(−12.3)*A₁₁+(−19.3)*U₁+(−12.1)*U₂+(−
11)*U₃+(−15.2)*U₁₅+(−11.3)*U₁₆+(−11.8)*C₃+(−17.4)*C₆+(−10.5)*C₇+
(−13.7)*G₁₃+(−25.9)*G₁₉−Tm−3*(GCₜₒₜₐₗ)−6*(GC₁₅₋₁₉)−30*X; and Formula IX
(−8)*A1+(−1)*A2+(12)*A3+(7)*A4+(18)*A5+(12)*A6+
(19)*A7+(6)*A8+(−4)*A9+(−5)*A10+(−2)*A11+(−5)*A12+(17)*A13+(−
3)*A14+(4)*A15+(2)*A16+(8)*A17+(11)*A18+(30)*A19+(−13)*U1+(−
10)*U2+(2)*U3+(−2)*U4+(−5)*U5+(5)*U6+(−2)*U7+(−10)*U8+(−
5)*U9+(15)*U10+(−1)*U11+(0)*U12+(10)*U13+(−9)*U14+(−13)*U15+(−
10)*U16+(3)*U17+(9)*U18+(9)*U19+(7)*C1+(3)*C2+(−21)*C3+(5)*C4+(−
9)*C5+(−20)*C6+(−18)*C7+(−5)*C8+(5)*C9+(1)*C10+(2)*C11+(−
5)*C12+(−3)*C13+(−6)*C14+(−2)*C15+(−5)*C16+(−3)*C17+(−12)*C18+(−
18)*C19+(14)*G1+(8)*G2+(7)*G3+(−10)*G4+(−
4)*G5+(2)*G6+(1)*G7+(9)*G8+(5)*G9+(−11)*G10+(1)*G11+(9)*G12+(−
24)*G13+(18)*G14+(11)*G15+(13)*G16+(−7)*G17+(−9)*G18+(−22)*G19+
6*(number of A+U in position 15-19)−3*(number of G+C in whole siRNA). Formula X

[0270] wherein

[0271] A₁=1 if A is the base at position 1 of the sense strand, otherwise its value is 0;

[0272] A₂=1 if A is the base at position 2 of the sense strand, otherwise its value is 0;

[0273] A₃=1 if A is the base at position 3 of the sense strand, otherwise its value is 0;

[0274] A₄=1 if A is the base at position 4 of the sense strand, otherwise its value is 0;

[0275] A₅=1 if A is the base at position 5 of the sense strand, otherwise its value is 0;

[0276] A₆=1 if A is the base at position 6 of the sense strand, otherwise its value is 0;

[0277] A₇=1 if A is the base at position 7 of the sense strand, otherwise its value is 0;

[0278] A₁₀=1 if A is the base at position 10 of the sense strand, otherwise its value is 0;

[0279] A₁₁=1 if A is the base at position 11 of the sense strand, otherwise its value is 0;

[0280] A₁₃=1 if A is the base at position 13 of the sense strand, otherwise its value is 0;

[0281] A₁₉=1 if A is the base at position 19 of the sense strand, otherwise if another base is present or the sense strand is only 18 base pairs in length, its value is 0;

[0282] C₃=1 if C is the base at position 3 of the sense strand, otherwise its value is 0;

[0283] C₄=1 if C is the base at position 4 of the sense strand, otherwise its value is 0;

[0284] C₅=1 if C is the base at position 5 of the sense strand, otherwise its value is 0;

[0285] C₆=1 if C is the base at position 6 of the sense strand, otherwise its value is 0;

[0286] C₇=1 if C is the base at position 7 of the sense strand, otherwise its value is 0;

[0287] C₉=1 if C is the base at position 9 of the sense strand, otherwise its value is 0;

[0288] C₁₇=1 if C is the base at position 17 of the sense strand, otherwise its value is 0;

[0289] C₁₈=1 if C is the base at position 18 of the sense strand, otherwise its value is 0;

[0290] C₁₉=1 if C is the base at position 19 of the sense strand, otherwise if another base is present or the sense strand is only 18 base pairs in length, its value is 0;

[0291] G₁=1 if G is the base at position 1 on the sense strand, otherwise its value is 0;

[0292] G₂=1 if G is the base at position 2 of the sense strand, otherwise its value is 0;

[0293] G₈=1 if G is the base at position 8 on the sense strand, otherwise its value is 0;

[0294] G₁₀=1 if G is the base at position 10 on the sense strand, otherwise its value is 0;

[0295] G₁₃=1 if G is the base at position 13 on the sense strand, otherwise its value is 0;

[0296] G₁₉=1 if G is the base at position 19 of the sense strand, otherwise if another base is present or the sense strand is only 18 base pairs in length, its value is 0;

[0297] U₁=1 if U is the base at position 1 on the sense strand, otherwise its value is 0;

[0298] U₂=1 if U is the base at position 2 on the sense strand, otherwise its value is 0;

[0299] U₃=1 if U is the base at position 3 on the sense strand, otherwise its value is 0;

[0300] U₄=1 if U is the base at position 4 on the sense strand, otherwise its value is 0;

[0301] U₇=1 if U is the base at position 7 on the sense strand, otherwise its value is 0;

[0302] U₉=1 if U is the base at position 9 on the sense strand, otherwise its value is 0;

[0303] U₁₀=1 if U is the base at position 10 on the sense strand, otherwise its value is 0;

[0304] U₁₅=1 if U is the base at position 15 on the sense strand, otherwise its value is 0;

[0305] U₁₆=1 if U is the base at position 16 on the sense strand, otherwise its value is 0;

[0306] U₁₇=1 if U is the base at position 17 on the sense strand, otherwise its value is 0;

[0307] U₁₈=1 if U is the base at position 18 on the sense strand, otherwise its value is 0;

[0308] GC₁₅₋₁₉=the number of G and C bases within positions 15-19 of the sense strand, or within positions 15-18 if the sense strand is only 18 base pairs in length;

[0309] GCₜₒₜₐₗ=the number of G and C bases in the sense strand;

[0310] Tm=100 if the siRNA oligo has the internal repeat longer then 4 base pairs, otherwise its value is 0; and

[0311] X=the number of times that the same nucleotide repeats four or more times in a row.

[0312] The above formulas VIII, IX, and X, as well as formulas I-VII, provide methods for selecting siRNA in order to increase the efficiency of gene silencing. A subset of variables of any of the formulas may be used, though when fewer variables are used, the optimization hierarchy becomes less reliable.

[0313] With respect to the variables of the above-referenced formulas, a single letter of A or C or G or U followed by a subscript refers to a binary condition. The binary condition is that either the particular base is present at that particular position (wherein the value is “1”) or the base is not present (wherein the value is “0”). Because position 19 is optional, i.e., there might be only 18 base pairs, when there are only 18 base pairs, any base with a subscript of 19 in the formulas above would have a zero value for that parameter. Before or after each variable is a number followed by *, which indicates that the value of the variable is to be multiplied or weighed by that number.

[0314] The numbers preceding the variables A, or G, or C, or U in Formulas VIII, IX, and X (or after the variables in Formula I-VII) were determined by comparing the difference in the frequency of individual bases at different positions in functional siRNA and total siRNA. Specifically, the frequency in which a given base was observed at a particular position in functional groups was compared with the frequency that that same base was observed in the total, randomly selected siRNA set. If the absolute value of the difference between the functional and total values was found to be greater than 6%, that parameter was included in the equation. Thus, for instance, if the frequency of finding a “G” at position 13 (G₁₃) is found to be 6% in a given functional group, and the frequency of G₁₃ in the total population of siRNAs is 20%, the difference between the two values is 6%-20%=−14%. As the absolute value is greater than six (6), this factor (−14) is included in the equation. Thus, in Formula VIII, in cases where the siRNA under study has a G in position 13, the accrued value is (−14)*(1)=−14. In contrast, when a base other than G is found at position 13, the accrued value is (−14)*(0)=0.

[0315] When developing a means to optimize siRNAs, the inventors observed that a bias toward low internal thermodynamic stability of the duplex at the 5′-antisense (AS) end is characteristic of naturally occurring miRNA precursors. The inventors extended this observation to siRNAs for which functionality had been assessed in tissue culture.

[0316] With respect to the parameter GC₁₅₋₁₉, a value of 0-5 will be ascribed depending on the number of G or C bases at positions 15 to 19. If there are only 18 base pairs, the value is between 0 and 4.

[0317] With respect to the criterion GCₜₒₜₐₗ content, a number from 0-30 will be ascribed, which correlates to the total number of G and C nucleotides on the sense strand, excluding overhangs. Without wishing to be bound by any one theory, it is postulated that the significance of the GC content (as well as AU content at positions 15-19, which is a parameter for formulas III-VII) relates to the easement of the unwinding of a double-stranded siRNA duplex. Duplex unwinding is believed to be crucial for siRNA functionality in vivo and overall low internal stability, especially low internal stability of the first unwound base pair is believed to be important to maintain sufficient processivity of RISC complex-induced duplex unwinding. If the duplex has 19 base pairs, those at positions 15-19 on the sense strand will unwind first if the molecule exhibits a sufficiently low internal stability at that position. As persons skilled in the art are aware, RISC is a complex of approximately twelve proteins; Dicer is one, but not the only, helicase within this complex. Accordingly, although the GC parameters are believed to relate to activity with Dicer, they are also important for activity with other RISC proteins.

[0318] The value of the parameter Tm is 0 when there are no internal repeats longer than (or equal to) four base pairs present in the siRNA duplex; otherwise the value is 1. Thus for example, if the sequence ACGUACGU, or any other four nucleotide (or more) palindrome exists within the structure, the value will be one (1). Alternatively if the structure ACGGACG, or any other 3 nucleotide (or less) palindrome exists, the value will be zero (0).

[0319] The variable “X” refers to the number of times that the same nucleotide occurs contiguously in a stretch of four or more units. If there are, for example, four contiguous As in one part of the sequence and elsewhere in the sequence four contiguous Cs, X=2. Further, if there are two separate contiguous stretches of four of the same nucleotides or eight or more of the same nucleotides in a row, then X=2. However, X does not increase for five, six or seven contiguous nucleotides.

[0320] Again, when applying Formula VIII, Formula IX, or Formula X, to a given mRNA, (the “target RNA” or “target molecule”), one may use a computer program to evaluate the criteria for every sequence of 18-30 base pairs or only sequences of a fixed length, e.g., 19 base pairs. Preferably the computer program is designed such that it provides a report ranking of all of the potential siRNAs 18-30 base pairs, ranked according to which sequences generate the highest value. A higher value refers to a more efficient siRNA for a particular target gene. The computer program that may be used may be developed in any computer language that is known to be useful for scoring nucleotide sequences, or it may be developed with the assistance of commercially available product such as Microsoft's PRODUCT.NET. Additionally, rather than run every sequence through one and/or another formula, one may compare a subset of the sequences, which may be desirable if for example only a subset are available. For instance, it may be desirable to first perform a BLAST (Basic Local Alignment Search Tool) search and to identify sequences that have no homology to other targets. Alternatively, it may be desirable to scan the sequence and to identify regions of moderate CC context, then perform relevant calculations using one of the above-described formulas on these regions. These calculations can be done manually or with the aid of a computer.

[0321] As with Formulas I-VII, either Formula VIII, Formula IX, or Formula X may be used for a given mRNA target sequence. However, it is possible that according to one or the other formula more than one siRNA will have the same value. Accordingly, it is beneficial to have a second formula by which to differentiate sequences. Formulas IX and X were derived in a similar fashion as Formula VIII, yet used a larger data set and thus yields sequences with higher statistical correlations to highly functional duplexes. The sequence that has the highest value ascribed to it may be referred to as a “first optimized duplex.” The sequence that has the second highest value ascribed to it may be referred to as a “second optimized duplex.” Similarly, the sequences that have the third and fourth highest values ascribed to them may be referred to as a third optimized duplex and a fourth optimized duplex, respectively. When more than one sequence has the same value, each of them may, for example, be referred to as first optimized duplex sequences or co-first optimized duplexes. Formula X is similar to Formula IX, yet uses a greater numbers of variables and for that reason, identifies sequences on the basis of slightly different criteria.

[0322] It should also be noted that the output of a particular algorithm will depend on several of variables including: (1) the size of the data base(s) being analyzed by the algorithm, and (2) the number and stringency of the parameters being applied to screen each sequence. Thus, for example, in U.S. patent application Ser. No. 10/714,333, entitled “Functional and Hyperfunctional siRNA,” filed Nov. 14, 2003, Formula VIII was applied to the known human genome (NCBI REFSEQ database) through ENTREZ (EFETCH). As a result of these procedures, roughly 1.6 million siRNA sequences were identified. Application of Formula VIII to the same database in March of 2004 yielded roughly 2.2 million sequences, a difference of approximately 600,000 sequences resulting from the growth of the database over the course of the months that span this period of time. Application of other formulas (e.g., Formula X) that change the emphasis of, include, or eliminate different variables can yield unequal numbers of siRNAs. Alternatively, in cases where application of one formula to one or more genes fails to yield sufficient numbers of siRNAs with scores that would be indicative of strong silencing, said genes can be reassessed with a second algorithm that is, for instance, less stringent.

[0323] siRNA sequences identified using Formula VIII and Formula X (minus sequences generated by Formula VIII) are contained within the sequence listing. The data included in the sequence listing is described more fully below. The sequences identified by Formula VIII and Formula X that are disclosed in the sequence listing may be used in gene silencing applications.

[0324] It should be noted that for Formulas VIII, IX, and X all of the aforementioned criteria are identified as positions on the sense strand when oriented in the 5′ to 3′ direction as they are identified in connection with Formulas I-VII unless otherwise specified.

[0325] Formulas I-X, may be used to select or to evaluate one, or more than one, siRNA in order to optimize silencing. Preferably, at least two optimized siRNAs that have been selected according to at least one of these formulas are used to silence a gene, more preferably at least three and most preferably at least four. The siRNAs may be used individually or together in a pool or kit. Further, they may be applied to a cell simultaneously or separately. Preferably, the at least two siRNAs are applied simultaneously. Pools are particularly beneficial for many research applications. However, for therapeutics, it may be more desirable to employ a single hyperfunctional siRNA as described elsewhere in this application.

[0326] When planning to conduct gene silencing, and it is necessary to choose between two or more siRNAs, one should do so by comparing the relative values when the siRNA are subjected to one of the formulas above. In general a higher scored siRNA should be used.

[0327] Useful applications include, but are not limited to, target validation, gene functional analysis, research and drug discovery, gene therapy and therapeutics. Methods for using siRNA in these applications are well known to persons of skill in the art.

[0328] Because the ability of siRNA to function is dependent on the sequence of the RNA and not the species into which it is introduced, the present invention is applicable across a broad range of species, including but not limited to all mammalian species, such as humans, dogs, horses, cats, cows, mice, hamsters, chimpanzees and gorillas, as well as other species and organisms such as bacteria, viruses, insects, plants and C. elegans.

[0329] The present invention is also applicable for use for silencing a broad range of genes, including but not limited to the roughly 45,000 genes of a human genome, and has particular relevance in cases where those genes are associated with diseases such as diabetes, Alzheimer's, cancer, as well as all genes in the genomes of the aforementioned organisms.

[0330] The siRNA selected according to the aforementioned criteria or one of the aforementioned algorithms are also, for example, useful in the simultaneous screening and functional analysis of multiple genes and gene families using high throughput strategies, as well as in direct gene suppression or silencing.

Development of the Algorithms

[0331] To identify siRNA sequence features that promote functionality and to quantify the importance of certain currently accepted conventional factors—such as G/C content and target site accessibility—the inventors synthesized an siRNA panel consisting of 270 siRNAs targeting three genes, Human Cyclophilin, Firefly Luciferase, and Human DBI. In all three cases, siRNAs were directed against specific regions of each gene. For Human Cyclophilin and Firefly Luciferase, ninety siRNAs were directed against a 199 bp segment of each respective mRNA. For DBI, 90 siRNAs were directed against a smaller, 109 base pair region of the mRNA. The sequences to which the siRNAs were directed are provided below.

[0332] It should be noted that in certain sequences, “t” is present. This is because many databases contain information in this manner. However, the t denotes a uracil residue in mRNA and siRNA. Any algorithm will, unless otherwise specified, process at in a sequence as a u.

Human cyclophilin: 193-390, M60857
SEQ. ID NO. 29:
gttccaaaaa cagtggataa ttttgtggcc ttagctacag
gagagaaagg atttggctac aaaaacagca aattccatcg
tgtaatcaag gacttcatga tccagggcgg agacttcacc
aggggagatg gcacaggagg aaagagcatc tacggtgagc
gcttccccga tgagaacttc aaactgaagc actacgggcc
tggctggg
Firefly luciferase: 1434-1631, U47298
(pGL3, Promega)
SEQ. ID NO. 30:
tgaacttccc gccgccgttg ttgttttgga gcacggaaag
acgatgacgg aaaaagagat cgtggattac gtcgccagtc
aagtaacaac cgcgaaaaag ttgcgcggag gagttgtgtt
tgtggacgaa gtaccgaaag gtcttaccgg aaaactcgac
gcaagaaaaa tcagagagat cctcataaag gccaagaagg
DBI, NM_020548 (202-310)
(every position)
SEQ. ID NO. 0031:
acgggcaagg ccaagtggga tgcctggaat gagctgaaag
ggacttccaa ggaagatgcc atgaaagctt acatcaacaa
agtagaagag ctaaagaaaa aatacggg

[0333] A list of the siRNAs appears in Table III (see Examples Section, Example II)

[0334] The set of duplexes was analyzed to identify correlations between siRNA functionality and other biophysical or thermodynamic properties. When the siRNA panel was analyzed in functional and non-functional subgroups, certain nucleotides were much more abundant at certain positions in functional or non-functional groups. More specifically, the frequency of each nucleotide at each position in highly functional siRNA duplexes was compared with that of nonfunctional duplexes in order to assess the preference for or against any given nucleotide at every position. These analyses were used to determine important criteria to be included in the siRNA algorithms (Formulas VIII, IX, and X).

[0335] The data set was also analyzed for distinguishing biophysical properties of siRNAs in the functional group, such as optimal percent of GC content, propensity for internal structures and regional thermodynamic stability. Of the presented criteria, several are involved in duplex recognition, RISC activation/duplex unwinding, and target cleavage catalysis.

[0336] The original data set that was the source of the statistically derived criteria is shown in FIG. 2. Additionally, this figure shows that random selection yields siRNA duplexes with unpredictable and widely varying silencing potencies as measured in tissue culture using HEK293 cells. In the figure, duplexes are plotted such that each x-axis tick-mark represents an individual siRNA, with each subsequent siRNA differing in target position by two nucleotides for Human Cyclophilin B and Firefly Luciferase, and by one nucleotide for Human DBI. Furthermore, the y-axis denotes the level of target expression remaining after transfection of the duplex into cells and subsequent silencing of the target.

[0337] siRNA identified and optimized in this document work equally well in a wide range of cell types. FIG. 3a shows the evaluation of thirty siRNAs targeting the DBI gene in three cell lines derived from different tissues. Each DBI siRNA displays very similar functionality in HEK293 (ATCC, CRL-1573, human embryonic kidney), HeLa (ATCC, CCL-2, cervical epithelial adenocarcinoma) and DU145 (HTB-81, prostate) cells as determined by the B-DNA assay. Thus, siRNA functionality is determined by the primary sequence of the siRNA and not by the intracellular environment. Additionally, it should be noted that although the present invention provides for a determination of the functionality of siRNA for a given target, the same siRNA may silence more than one gene. For example, the complementary sequence of the silencing siRNA may be present in more than one gene. Accordingly, in these circumstances, it may be desirable not to use the siRNA with highest SMARTSCORE™, or siRNA ranking. In such circumstances, it may be desirable to use the siRNA with the next highest SMARTSCORE™, or siRNA ranking.

[0338] To determine the relevance of G/C content in siRNA function, the G/C content of each duplex in the panel was calculated and the functional classes of siRNAs (<F50, ≧F50, ≧F80, ≧F95 where F refers to the percent gene silencing) were sorted accordingly. The majority of the highly-functional siRNAs (≧F95) fell within the G/C content range of 36%-52% (FIG. 3B). Twice as many non-functional (<F50) duplexes fell within the high G/C content groups (>57% GC content) compared to the 36%-52% group. The group with extremely low GC content (26% or less) contained a higher proportion of non-functional siRNAs and no highly-functional siRNAs. The G/C content range of 30%-52% was therefore selected as Criterion I for siRNA functionality, consistent with the observation that a G/C range 30%-70% promotes efficient RNAi targeting. Application of this criterion alone provided only a marginal increase in the probability of selecting functional siRNAs from the panel: selection of F50 and F95 siRNAs was improved by 3.6% and 2.2%, respectively. The siRNA panel presented here permitted a more systematic analysis and quantification of the importance of this criterion than that used previously.

[0339] A relative measure of local internal stability is the A/U base pair (bp) content; therefore, the frequency of A/U bp was determined for each of the five terminal positions of the duplex (5′ sense (S)/5′ antisense (AS)) of all siRNAs in the panel. Duplexes were then categorized by the number of A/U bp in positions 1-5 and 15-19 of the sense strand. The thermodynamic flexibility of the duplex 5′-end (positions 1-5; S) did not appear to correlate appreciably with silencing potency, while that of the 3′-end (positions 15-19; S) correlated with efficient silencing. No duplexes lacking A/U bp in positions 15-19 were functional. The presence of one A/U bp in this region conferred some degree of functionality, but the presence of three or more A/Us was preferable and therefore defined as Criterion II. When applied to the test panel, only a marginal increase in the probability of functional siRNA selection was achieved: a 1.8% and 2.3% increase for F50 and F95 duplexes, respectively (Table IV).

[0340] The complementary strands of siRNAs that contain internal repeats or palindromes may form internal fold-back structures. These hairpin-like structures exist in equilibrium with the duplexed form effectively reducing the concentration of functional duplexes. The propensity to form internal hairpins and their relative stability can be estimated by predicted melting temperatures. High Tm reflects a tendency to form hairpin structures. Lower Tm values indicate a lesser tendency to form hairpins. When the functional classes of siRNAs were sorted by Tₘ (FIG. 3c), the following trends were identified: duplexes lacking stable internal repeats were the most potent silencers (no F95 duplex with predicted hairpin structure Tₘ>60° C.). In contrast, about 60% of the duplexes in the groups having internal hairpins with calculated Tₘ values less than 20° C. were F80. Thus, the stability of internal repeats is inversely proportional to the silencing effect and defines Criterion III (predicted hairpin structure Tₘ≦20° C.).

Sequence-Based Determinants of siRNA Functionality

[0341] When the siRNA panel was sorted into functional and non-functional groups, the frequency of a specific nucleotide at each position in a functional siRNA duplex was compared with that of a nonfunctional duplex in order to assess the preference for or against a certain nucleotide. FIG. 4 shows the results of these queries and the subsequent resorting of the data set (from FIG. 2). The data is separated into two sets: those duplexes that meet the criteria, a specific nucleotide in a certain position—grouped on the left (Selected) and those that do not—grouped on the right (Eliminated). The duplexes are further sorted from most functional to least functional with the y-axis of FIG. 4a-e representing the % expression i.e., the amount of silencing that is elicited by the duplex (Note: each position on the X-axis represents a different duplex). Statistical analysis revealed correlations between silencing and several sequence-related properties of siRNAs. FIG. 4 and Table IV show quantitative analysis for the following five sequence-related properties of siRNA: (A) an A at position 19 of the sense strand; (B) an A at position 3 of the sense strand; (C) a U at position 10 of the sense strand; (D) a base other than G at position 13 of the sense strand; and (E) a base other than C at position 19 of the sense strand.

[0342] When the siRNAs in the panel were evaluated for the presence of an A at position 19 of the sense strand, the percentage of non-functional duplexes decreased from 20% to 11.8%, and the percentage of F95 duplexes increased from 21.7% to 29.4% (Table IV). Thus, the presence of an A in this position defined Criterion IV.

[0343] Another sequence-related property correlated with silencing was the presence of an A in position 3 of the sense strand (FIG. 4b). Of the siRNAs with A3, 34.4% were F95, compared with 21.7% randomly selected siRNAs. The presence of a U base in position 10 of the sense strand exhibited an even greater impact (FIG. 4c). Of the duplexes in this group, 41.7% were F95. These properties became criteria V and VI, respectively.

[0344] Two negative sequence-related criteria that were identified also appear on FIG. 4. The absence of a G at position 13 of the sense strand, conferred a marginal increase in selecting functional duplexes (FIG. 4d). Similarly, lack of a C at position 19 of the sense strand also correlated with functionality (FIG. 4e). Thus, among functional duplexes, position 19 was most likely occupied by A, and rarely occupied by C. These rules were defined as criteria VII and VIII, respectively.

[0345] Application of each criterion individually provided marginal but statistically significant increases in the probability of selecting a potent siRNA. Although the results were informative, the inventors sought to maximize potency and therefore consider multiple criteria or parameters. Optimization is particularly important when developing therapeutics. Interestingly, the probability of selecting a functional siRNA based on each thermodynamic criteria was 2%-4% higher than random, but 4%-8% higher for the sequence-related determinates. Presumably, these sequence-related increases reflect the complexity of the RNAi mechanism and the multitude of protein-RNA interactions that are involved in RNAi-mediated silencing.

TABLE IV

| | PERCENT | | IMPROVEMENT |
|---|---|---|---|
| CRITERION | FUNCTIONAL | | OVER RANDOM (%) |
| I. 30%-52% G/C Content | <F50 | 16.4 | −3.6 |
| | ≧F50 | 83.6 | 3.6 |
| | ≧F80 | 60.4 | 4.3 |
| | ≧F95 | 23.9 | 2.2 |
| II. At least 3 A/U bases at | <F50 | 18.2 | −1.8 |
| positions 15-19 of the sense | ≧F50 | 81.8 | 1.8 |
| strand | ≧F80 | 59.7 | 3.6 |
| | ≧F95 | 24.0 | 2.3 |
| III. Absence of internal | <F50 | 16.7 | −3.3 |
| repeats, as measured by Tm of | ≧F50 | 83.3 | 3.3 |
| secondary structure ≦20° C. | ≧F80 | 61.1 | 5.0 |
| | ≧F95 | 24.6 | 2.9 |
| IV. An A base at position 19 | <F50 | 11.8 | −8.2 |
| of the sense strand | ≧F50 | 88.2 | 8.2 |
| | ≧F80 | 75.0 | 18.9 |
| | ≧F95 | 29.4 | 7.7 |
| V. An A base at position 3 of | <F50 | 17.2 | −2.8 |
| the sense strand | ≧F50 | 82.8 | 2.8 |
| | ≧F80 | 62.5 | 6.4 |
| | ≧F95 | 34.4 | 12.7 |
| VI. A U base at position 10 | <F50 | 13.9 | −6.1 |
| of the sense strand | ≧F50 | 86.1 | 6.1 |
| | ≧F80 | 69.4 | 13.3 |
| | ≧F95 | 41.7 | 20 |
| VII. A base other than C at | <F50 | 18.8 | −1.2 |
| position 19 of the sense strand | ≧F50 | 81.2 | 1.2 |
| | ≧F80 | 59.7 | 3.6 |
| | ≧F95 | 24.2 | 2.5 |
| VIII. A base other than G at | <F50 | 15.2 | −4.8 |
| position 13 of the sense strand | ≧F50 | 84.8 | 4.8 |
| | ≧F80 | 61.4 | 5.3 |
| | ≧F95 | 26.5 | 4.8 |

The siRNA Selection Algorithm

[0346] In an effort to improve selection further, all identified criteria, including but not limited to those listed in Table IV were combined into the algorithms embodied in Formula VIII, Formula IX, and Formula X. Each siRNA was then assigned a score (referred to as a SMARTSCORE™, or siRNA ranking) according to the values derived from the formulas. Duplexes that scored higher than 0 or −20 (unadjusted), for Formulas VIII and IX, respectively, effectively selected a set of functional siRNAs and excluded all non-functional siRNAs. Conversely, all duplexes scoring lower than 0 and −20 (minus 20) according to formulas VIII and IX, respectively, contained some functional siRNAs but included all non-functional siRNAs. A graphical representation of this selection is shown in FIG. 5. It should be noted that the scores derived from the algorithm can also be provided as “adjusted” scores. To convert Formula VIII unadjusted scores into adjusted scores it is necessary to use the following equation:
(160+unadjusted score)/2.25

[0347] When this takes place, an unadjusted score of “0” (zero) is converted to 75. Similarly, unadjusted scores for Formula X can be converted to adjusted scores. In this instance, the following equation is applied:
(228+unadjusted score)/3.56

[0348] When these manipulations take place, an unadjusted score of 38 is converted to an adjusted score of 75.

[0349] The methods for obtaining the seven criteria embodied in Table IV are illustrative of the results of the process used to develop the information for Formulas VIII, IX, and X. Thus similar techniques were used to establish the other variables and their multipliers. As described above, basic statistical methods were use to determine the relative values for these multipliers.

[0350] To determine the value for “Improvement over Random” the difference in the frequency of a given attribute (e.g., GC content, base preference) at a particular position is determined between individual functional groups (e.g., <F50) and the total siRNA population studied (e.g., 270 siRNA molecules selected randomly). Thus, for instance, in Criterion I (30%-52% GC content) members of the <F50 group were observed to have GC contents between 30-52% in 16.4% of the cases. In contrast, the total group of 270 siRNAs had GC contents in this range, 20% of the time. Thus for this particular attribute, there is a small negative correlation between 30%-52% GC content and this functional group (i.e., 16.4%-20%=−3.6%). Similarly, for Criterion VI, (a “U” at position 10 of the sense strand), the >F95 group contained a “U” at this position 41.7% of the time. In contrast, the total group of 270 siRNAs had a “U” at this position 21.7% of the time, thus the improvement over random is calculated to be 20% (or 41.7%-21.7%).

Identifying the Average Internal Stability Profile of Strong siRNA

[0351] In order to identify an internal stability profile that is characteristic of strong siRNA, 270 different siRNAs derived from the cyclophilin B, the diazepam binding inhibitor (DBI), and the luciferase gene were individually transfected into HEK293 cells and tested for their ability to induce RNAi of the respective gene. Based on their performance in the in vivo assay, the sequences were then subdivided into three groups, (i) >95% silencing; (ii) 80-95% silencing; and (iii) less than 50% silencing. Sequences exhibiting 51-84% silencing were eliminated from further consideration to reduce the difficulties in identifying relevant thermodynamic patterns.

[0352] Following the division of siRNA into three groups, a statistical analysis was performed on each member of each group to determine the average internal stability profile (AISP) of the siRNA. To accomplish this the Oligo 5.0 Primer Analysis Software and other related statistical packages (e.g., Excel) were exploited to determine the internal stability of pentamers using the nearest neighbor method described by Freier et al., (1986) Improved free-energy parameters for predictions of RNA duplex stability, Proc Natl. Acad. Sci. USA 83(24): 9373-7. Values for each group at each position were then averaged, and the resulting data were graphed on a linear coordinate system with the Y-axis expressing the ΔG (free energy) values in kcal/mole and the X-axis identifying the position of the base relative to the 5′ end.

[0353] The results of the analysis identified multiple key regions in siRNA molecules that were critical for successful gene silencing. At the 3′-most end of the sense strand (5′antisense), highly functional siRNA (>95% gene silencing, see FIG. 6a, >F95) have a low internal stability (AISP of position 19=˜−7.6 kcal/mol). In contrast low-efficiency siRNA (i.e., those exhibiting less than 50% silencing, <F50) display a distinctly different profile, having high ΔG values (˜−8.4 kcal/mol) for the same position. Moving in a 5′ (sense strand) direction, the internal stability of highly efficient siRNA rises (position 12=˜−8.3 kcal/mole) and then drops again (position 7=˜−7.7 kcal/mol) before leveling off at a value of approximately −8.1 kcal/mol for the 5′ terminus. siRNA with poor silencing capabilities show a distinctly different profile. While the AISP value at position 12 is nearly identical with that of strong siRNAs, the values at positions 7 and 8 rise considerably, peaking at a high of ˜−9.0 kcal/mol. In addition, at the 5′ end of the molecule the AISP profile of strong and weak siRNA differ dramatically. Unlike the relatively strong values exhibited by siRNA in the >95% silencing group, siRNAs that exhibit poor silencing activity have weak AISP values (−7.6, −7.5, and −7.5 kcal/mol for positions 1, 2 and 3 respectively).

[0354] Overall the profiles of both strong and weak siRNAs form distinct sinusoidal shapes that are roughly 180° out-of-phase with each other. While these thermodynamic descriptions define the archetypal profile of a strong siRNA, it will likely be the case that neither the ΔG values given for key positions in the profile or the absolute position of the profile along the Y-axis (i.e., the ΔG-axis) are absolutes. Profiles that are shifted upward or downward (i.e., having on an average, higher or lower values at every position) but retain the relative shape and position of the profile along the X-axis can be foreseen as being equally effective as the model profile described here. Moreover, it is likely that siRNA that have strong or even stronger gene-specific silencing effects might have exaggerated ΔG values (either higher or lower) at key positions. Thus, for instance, it is possible that the 5′-most position of the sense strand (position 19) could have ΔG values of 7.4 kcal/mol or lower and still be a strong siRNA if, for instance, a G-C→G-T/U mismatch were substituted at position 19 and altered duplex stability. Similarly, position 12 and position 7 could have values above 8.3 kcal/mol and below 7.7 kcal/mole, respectively, without abating the silencing effectiveness of the molecule. Thus, for instance, at position 12, a stabilizing chemical modification (e.g., a chemical modification of the 2′ position of the sugar backbone) could be added that increases the average internal stability at that position. Similarly, at position 7, mismatches similar to those described previously could be introduced that would lower the ΔG values at that position.

[0355] Lastly, it is important to note that while functional and non-functional siRNA were originally defined as those molecules having specific silencing properties, both broader or more limiting parameters can be used to define these molecules. As used herein, unless otherwise specified, “non-functional siRNA” are defined as those siRNA that induce less than 50% (<50%) target silencing, “semi-functional siRNA” induce 50-79% target silencing, “functional siRNA” are molecules that induce 80-95% gene silencing, and “highly-functional siRNA” are molecules that induce great than 95% gene silencing. These definitions are not intended to be rigid and can vary depending upon the design and needs of the application. For instance, it is possible that a researcher attempting to map a gene to a chromosome using a functional assay, may identify an siRNA that reduces gene activity by only 30%. While this level of gene silencing may be “non-functional” for, e.g., therapeutic needs, it is sufficient for gene mapping purposes and is, under these uses and conditions, “functional.” For these reasons, functional siRNA can be defined as those molecules having greater than 10%, 20%, 30%, 40%, 50%, 60%, 70%, 80%, or 90% silencing capabilities at 100 nM transfection conditions. Similarly, depending upon the needs of the study and/or application, non-functional and semi-functional siRNA can be defined as having different parameters. For instance, semi-functional siRNA can be defined as being those molecules that induce 20%, 30%, 40%, 50%, 60%, or 70% silencing at 100 nM transfection conditions. Similarly, non-functional siRNA can be defined as being those molecules that silence gene expression by less than 70%, 60%, 50%, 40%, 30%, or less. Nonetheless, unless otherwise stated, the descriptions stated in the “Definitions” section of this text should be applied.

[0356] Functional attributes can be assigned to each of the key positions in the AISP of strong siRNA. The low 5′ (sense strand) AISP values of strong siRNAs may be necessary for determining which end of the molecule enters the RISC complex. In contrast, the high and low AISP values observed in the central regions of the molecule may be critical for siRNA-target mRNA interactions and product release, respectively.

[0357] If the AISP values described above accurately define the thermodynamic parameters of strong siRNA, it would be expected that similar patterns would be observed in strong siRNA isolated from nature. Natural siRNAs exist in a harsh, RNase-rich environment and it can be hypothesized that only those siRNA that exhibit heightened affinity for RISC (i.e., siRNA that exhibit an average internal stability profile similar to those observed in strong siRNA) would survive in an intracellular environment. This hypothesis was tested using GFP-specific siRNA isolated from N. benthamiana. Llave et al. (2002) Endogenous and Silencing-Associated Small RNAs in Plants, The Plant Cell 14, 1605-1619, introduced long double-stranded GFP-encoding RNA into plants and subsequently re-isolated GFP-specific siRNA from the tissues. The AISP of fifty-nine of these GFP-siRNA were determined, averaged, and subsequently plotted alongside the AISP profile obtained from the cyclophilin B/DBI/luciferase siRNA having >90% silencing properties (FIG. 6b). Comparison of the two groups show that profiles are nearly identical. This finding validates the information provided by the internal stability profiles and demonstrates that: (1) the profile identified by analysis of the cyclophilin B/DBI/luciferase siRNAs are not gene specific; and (2) AISP values can be used to search for strong siRNAs in a variety of species.

[0358] Both chemical modifications and base-pair mismatches can be incorporated into siRNA to alter the duplex's AISP and functionality. For instance, introduction of mismatches at positions 1 or 2 of the sense strand destabilized the 5′ end of the sense strand and increases the functionality of the molecule (see Luc, FIG. 7). Similarly, addition of 2′-O-methyl groups to positions 1 and 2 of the sense strand can also alter the AISP and (as a result) increase both the functionality of the molecule and eliminate off-target effects that results from sense strand homology with the unrelated targets (FIG. 8).

Rationale for Criteria in a Biological Context

[0359] The fate of siRNA in the RNAi pathway may be described in 5 major steps: (1) duplex recognition and pre-RISC complex formation; (2) ATP-dependent duplex unwinding/strand selection and RISC activation; (3) mRNA target identification; (4) mRNA cleavage, and (5) product release (FIG. 1). Given the level of nucleic acid-protein interactions at each step, siRNA functionality is likely influenced by specific biophysical and molecular properties that promote efficient interactions within the context of the multi-component complexes. Indeed, the systematic analysis of the siRNA test set identified multiple factors that correlate well with functionality. When combined into a single algorithm, they proved to be very effective in selecting active siRNAs.

[0360] The factors described here may also be predictive of key functional associations important for each step in RNAi. For example, the potential formation of internal hairpin structures correlated negatively with siRNA functionality. Complementary strands with stable internal repeats are more likely to exist as stable hairpins thus decreasing the effective concentration of the functional duplex form. This suggests that the duplex is the preferred conformation for initial pre-RISC association. Indeed, although single complementary strands can induce gene silencing, the effective concentration required is at least two orders of magnitude higher than that of the duplex form.

[0361] siRNA-pre-RISC complex formation is followed by an ATP-dependent duplex unwinding step and “activation” of the RISC. The siRNA functionality was shown to correlate with overall low internal stability of the duplex and low internal stability of the 3′ sense end (or differential internal stability of the 3′ sense compare to the 5′ sense strand), which may reflect strand selection and entry into the RISC. Overall duplex stability and low internal stability at the 3′ end of the sense strand were also correlated with siRNA functionality. Interestingly, siRNAs with very high and very low overall stability profiles correlate strongly with non-functional duplexes. One interpretation is that high internal stability prevents efficient unwinding while very low stability reduces siRNA target affinity and subsequent mRNA cleavage by the RISC.

[0362] Several criteria describe base preferences at specific positions of the sense strand and are even more intriguing when considering their potential mechanistic roles in target recognition and mRNA cleavage. Base preferences for A at position 19 of the sense strand but not C, are particularly interesting because they reflect the same base preferences observed for naturally occurring miRNA precursors. That is, among the reported miRNA precursor sequences 75% contain a U at position 1 which corresponds to an A in position 19 of the sense strand of siRNAs, while G was under-represented in this same position for miRNA precursors. These observations support the hypothesis that both miRNA precursors and siRNA duplexes are processed by very similar if not identical protein machinery. The functional interpretation of the predominance of a U/A base pair is that it promotes flexibility at the 5′antisense ends of both siRNA duplexes and miRNA precursors and facilitates efficient unwinding and selective strand entrance into an activated RISC.

[0363] Among the criteria associated with base preferences that are likely to influence mRNA cleavage or possibly product release, the preference for U at position 10 of the sense strand exhibited the greatest impact, enhancing the probability of selecting an F80 sequence by 13.3%. Activated RISC preferentially cleaves target mRNA between nucleotides 10 and 11 relative to the 5′ end of the complementary targeting strand. Therefore, it may be that U, the preferred base for most endoribonucleases, at this position supports more efficient cleavage. Alternatively, a U/A bp between the targeting siRNA strand and its cognate target mRNA may create an optimal conformation for the RISC-associated “slicing” activity.

Post Algorithm Filters

[0364] According to another embodiment, the output of any one of the formulas previously listed can be filtered to remove or select for siRNAs containing undesirable or desirable motifs or properties, respectively. In one example, sequences identified by any of the formulas can be filtered to remove any and all sequences that induce toxicity or cellular stress. Introduction of an siRNA containing a toxic motif into a cell can induce cellular stress and/or cell death (apoptosis) which in turn can mislead researchers into associating a particular (e.g., nonessential) gene with, e.g., an essential function. Alternatively, sequences generated by any of the before mentioned formulas can be filtered to identify and retain duplexes that contain toxic motifs. Such duplexes may be valuable from a variety of perspectives including, for instance, uses as therapeutic molecules. A variety of toxic motifs exist and can exert their influence on the cell through RNAi and non-RNAi pathways. Examples of toxic motifs are explained more fully in commonly assigned U.S. Provisional Patent Application Ser. No. 60/538,874, entitled “Identification of Toxic Sequences,” filed Jan. 23, 2004. Briefly, toxic motifs include A/G UUU A/G/U, G/C AAA G/C, and GCCA, or a complement of any of the foregoing.

[0365] In another instance, sequences identified by any of the before mentioned formulas can be filtered to identify duplexes that contain motifs (or general properties) that provide serum stability or induce serum instability. In one envisioned application of siRNA as therapeutic molecules, duplexes targeting disease-associated genes will be introduced into patients intravenously. As the half-life of single and double stranded RNA in serum is short, post-algorithm filters designed to select molecules that contain motifs that enhance duplex stability in the presence of serum and/or (conversely) eliminate duplexes that contain motifs that destabilize siRNA in the presence of serum, would be beneficial.

[0366] In another instance, sequences identified by any of the before mentioned formulas can be filtered to identify duplexes that are hyperfunctional. Hyperfunctional sequences are defined as those sequences that (1) induce greater than 95% silencing of a specific target when they are transfected at subnanomolar concentrations (i.e., less than one nanomolar); and/or (2) induce functional (or better) levels of silencing for greater than 96 hours. Filters that identify hyperfunctional molecules can vary widely. In one example, the top ten, twenty, thirty, or forty siRNA can be assessed for the ability to silence a given target at, e.g., concentrations of 1 nM and 0.5 nM to identify hyperfunctional molecules.

Pooling

[0367] According to another embodiment, the present invention provides a pool of at least two siRNAs, preferably in the form of a kit or therapeutic reagent, wherein one strand of each of the siRNAs, the sense strand comprises a sequence that is substantially similar to a sequence within a target mRNA. The opposite strand, the antisense strand, will preferably comprise a sequence that is substantially complementary to that of the target mRNA. More preferably, one strand of each siRNA will comprise a sequence that is identical to a sequence that is contained in the target mRNA. Most preferably, each siRNA will be 19 base pairs in length, and one strand of each of the siRNAs will be 100% complementary to a portion of the target mRNA.

[0368] By increasing the number of siRNAs directed to a particular target using a pool or kit, one is able both to increase the likelihood that at least one siRNA with satisfactory functionality will be included, as well as to benefit from additive or synergistic effects. Further, when two or more siRNAs directed against a single gene do not have satisfactory levels of functionality alone, if combined, they may satisfactorily promote degradation of the target messenger RNA and successfully inhibit translation. By including multiple siRNAs in the system, not only is the probability of silencing increased, but the economics of operation are also improved when compared to adding different siRNAs sequentially. This effect is contrary to the conventional wisdom that the concurrent use of multiple siRNA will negatively impact gene silencing (e.g., Holen, T. et al. (2003) Similar behavior of single strand and double strand siRNAs suggests they act through a common RNAi pathway. NAR 31: 2401-21407).

[0369] In fact, when two siRNAs were pooled together, 54% of the pools of two siRNAs induced more than 95% gene silencing. Thus, a 2.5-fold increase in the percentage of functionality was achieved by randomly combining two siRNAs. Further, over 84% of pools containing two siRNAs induced more than 80% gene silencing.

[0370] More preferably, the kit is comprised of at least three siRNAs, wherein one strand of each siRNA comprises a sequence that is substantially similar to a sequence of the target mRNA and the other strand comprises a sequence that is substantially complementary to the region of the target mRNA. As with the kit that comprises at least two siRNAs, more preferably one strand will comprise a sequence that is identical to a sequence that is contained in the mRNA and another strand that is 100% complementary to a sequence that is contained in the mRNA. During experiments, when three siRNAs were combined together, 60% of the pools induced more than 95% gene silencing and 92% of the pools induced more than 80% gene silencing.

[0371] Further, even more preferably, the kit is comprised of at least four siRNAs, wherein one strand of each siRNA comprises a sequence that is substantially similar to a region of the sequence of the target mRNA, and the other strand comprises a sequence that is substantially complementary to the region of the target mRNA. As with the kit or pool that comprises at least two siRNAs, more preferably one strand of each of the siRNA duplexes will comprise a sequence that is identical to a sequence that is contained in the mRNA, and another strand that is 100% complementary to a sequence that is contained in the mRNA.

[0372] Additionally, kits and pools with at least five, at least six, and at least seven siRNAs may also be useful with the present invention. For example, pools of five siRNA induced 95% gene silencing with 77% probability and 80% silencing with 98.8% probability. Thus, pooling of siRNAs together can result in the creation of a target-specific silencing reagent with almost a 99% probability of being functional. The fact that such high levels of success are achievable using such pools of siRNA, enables one to dispense with costly and time-consuming target-specific validation procedures.

[0373] For this embodiment, as well as the other aforementioned embodiments, each of the siRNAs within a pool will preferably comprise 18-30 base pairs, more preferably 18-25 base pairs, and most preferably 19 base pairs. Within each siRNA, preferably at least 18 contiguous bases of the antisense strand will be 100% complementary to the target mRNA. More preferably, at least 19 contiguous bases of the antisense strand will be 100% complementary to the target mRNA. Additionally, there may be overhangs on either the sense strand or the antisense strand, and these overhangs may be at either the 5′ end or the 3′ end of either of the strands, for example there may be one or more overhangs of 1-6 bases. When overhangs are present, they are not included in the calculation of the number of base pairs. The two nucleotide 3′ overhangs mimic natural siRNAs and are commonly used but are not essential. Preferably, the overhangs should consist of two nucleotides, most often dTdT or UU at the 3′ end of the sense and antisense strand that are not complementary to the target sequence. The siRNAs may be produced by any method that is now known or that comes to be known for synthesizing double stranded RNA that one skilled in the art would appreciate would be useful in the present invention. Preferably, the siRNAs will be produced by Dharmacon's proprietary ACE® technology. However, other methods for synthesizing siRNAs are well known to persons skilled in the art and include, but are not limited to, any chemical synthesis of RNA oligonucleotides, ligation of shorter oligonucleotides, in vitro transcription of RNA oligonucleotides, the use of vectors for expression within cells, recombinant Dicer products and PCR products.

[0374] The siRNA duplexes within the aforementioned pools of siRNAs may correspond to overlapping sequences within a particular mRNA, or non-overlapping sequences of the mRNA. However, preferably they correspond to non-overlapping sequences. Further, each siRNA may be selected randomly, or one or more of the siRNA may be selected according to the criteria discussed above for maximizing the effectiveness of siRNA.

[0375] Included in the definition of siRNAs are siRNAs that contain substituted and/or labeled nucleotides that may, for example, be labeled by radioactivity, fluorescence or mass. The most common substitutions are at the 2′ position of the ribose sugar, where moieties such as H (hydrogen) F, NH₃, OCH₃ and other O-alkyl, alkenyl, alkynyl, and orthoesters, may be substituted, or in the phosphorous backbone, where sulfur, amines or hydrocarbons may be substituted for the bridging of non-bridging atoms in the phosphodiester bond. Examples of modified siRNAs are explained more fully in commonly assigned U.S. patent application Ser. No. 10/613,077, filed Jul. 1, 2003.

[0376] Additionally, as noted above, the cell type into which the siRNA is introduced may affect the ability of the siRNA to enter the cell; however, it does not appear to affect the ability of the siRNA to function once it enters the cell. Methods for introducing double-stranded RNA into various cell types are well known to persons skilled in the art.

[0377] As persons skilled in the art are aware, in certain species, the presence of proteins such as RdRP, the RNA-dependent RNA polymerase, may catalytically enhance the activity of the siRNA. For example, RdRP propagates the RNAi effect in C. elegans and other non-mammalian organisms. In fact, in organisms that contain these proteins, the siRNA may be inherited. Two other proteins that are well studied and known to be a part of the machinery are members of the Argonaute family and Dicer, as well as their homologues. There is also initial evidence that the RISC complex might be associated with the ribosome so the more efficiently translated mRNAs will be more susceptible to silencing than others.

[0378] Another very important factor in the efficacy of siRNA is mRNA localization. In general, only cytoplasmic mRNAs are considered to be accessible to RNAi to any appreciable degree. However, appropriately designed siRNAs, for example, siRNAs modified with internucleotide linkages or 2′-O-methyl groups, may be able to cause silencing by acting in the nucleus. Examples of these types of modifications are described in commonly assigned U.S. patent application Ser. Nos. 10/431,027 and 10/613,077.

[0379] As described above, even when one selects at least two siRNAs at random, the effectiveness of the two may be greater than one would predict based on the effectiveness of two individual siRNAs. This additive or synergistic effect is particularly noticeable as one increases to at least three siRNAs, and even more noticeable as one moves to at least four siRNAs. Surprisingly, the pooling of the non-functional and semi-functional siRNAs, particularly more than five siRNAs, can lead to a silencing mixture that is as effective if not more effective than any one particular functional siRNA.

[0380] Within the kits of the present invention, preferably each siRNA will be present in a concentration of between 0.001 and 200 μM, more preferably between 0.01 and 200 nM, and most preferably between 0.1 and 10 nM.

[0381] In addition to preferably comprising at least four or five siRNAs, the kits of the present invention will also preferably comprise a buffer to keep the siRNA duplex stable. Persons skilled in the art are aware of buffers suitable for keeping siRNA stable. For example, the buffer may be comprised of 100 mM KCl, 30 mM HEPES-pH 7.5, and 1 mM MgCl₂. Alternatively, kits might contain complementary strands that contain any one of a number of chemical modifications (e.g., a 2′-O-ACE) that protect the agents from degradation by nucleases. In this instance, the user may (or may not) remove the modifying protective group (e.g., deprotect) before annealing the two complementary strands together.

[0382] By way of example, the kits may be organized such that pools of siRNA duplexes are provided on an array or microarray of wells or drops for a particular gene set or for unrelated genes. The array may, for example, be in 96 wells, 384 wells or 1284 wells arrayed in a plastic plate or on a glass slide using techniques now known or that come to be known to persons skilled in the art. Within an array, preferably there will be controls such as functional anti-lamin A/C, cyclophilin and two siRNA duplexes that are not specific to the gene of interest.

[0383] In order to ensure stability of the siRNA pools prior to usage, they may be retained in lyophilized form at minus twenty degrees (−20° C.) until they are ready for use. Prior to usage, they should be resuspended; however, even once resuspended, for example, in the aforementioned buffer, they should be kept at minus twenty degrees, (−20° C.) until used. The aforementioned buffer, prior to use, may be stored at approximately 4° C. or room temperature. Effective temperatures at which to conduct transfections are well known to persons skilled in the art and include for example, room temperature.

[0384] The kits may be applied either in vivo or in vitro. Preferably, the siRNA of the pools or kits is applied to a cell through transfection, employing standard transfection protocols. These methods are well known to persons skilled in the art and include the use of lipid-based carriers, electroporation, cationic carriers, and microinjection. Further, one could apply the present invention by synthesizing equivalent DNA sequences (either as two separate, complementary strands, or as hairpin molecules) instead of siRNA sequences and introducing them into cells through vectors. Once in the cells, the cloned DNA could be transcribed, thereby forcing the cells to generate the siRNA. Examples of vectors suitable for use with the present application include but are not limited to the standard transient expression vectors, adenoviruses, retroviruses, lentivirus-based vectors, as well as other traditional expression vectors. Any vector that has an adequate siRNA expression and procession module may be used. Furthermore, certain chemical modifications to siRNAs, including but not limited to conjugations to other molecules, may be used to facilitate delivery. For certain applications it may be preferable to deliver molecules without transfection by simply formulating in a physiological acceptable solution.

[0385] This embodiment may be used in connection with any of the aforementioned embodiments. Accordingly, the sequences within any pool may be selected by rational design.

Multigene Silencing

[0386] In addition to developing kits that contain multiple siRNA directed against a single gene, another embodiment includes the use of multiple siRNA targeting multiple genes. Multiple genes may be targeted through the use of high- or hyper-functional siRNA. High- or hyper-functional siRNA that exhibit increased potency, require lower concentrations to induce desired phenotypic (and thus therapeutic) effects. This circumvents RISC saturation. It therefore reasons that if lower concentrations of a single siRNA are needed for knockout or knockdown expression of one gene, then the remaining (uncomplexed) RISC will be free and available to interact with siRNA directed against two, three, four, or more, genes. Thus in this embodiment, the authors describe the use of highly functional or hyper-functional siRNA to knock out three separate genes. More preferably, such reagents could be combined to knockout four distinct genes. Even more preferably, highly functional or hyperfunctional siRNA could be used to knock out five distinct genes. Most preferably, siRNA of this type could be used to knockout or knockdown the expression of six or more genes.

Hyperfunctional siRNA

[0387] The term hyperfunctional siRNA (hf-siRNA) describes a subset of the siRNA population that induces RNAi in cells at low- or sub-nanomolar concentrations for extended periods of time. These traits, heightened potency and extended longevity of the RNAi phenotype, are highly attractive from a therapeutic standpoint. Agents having higher potency require lesser amounts of the molecule to achieve the desired physiological response, thus reducing the probability of side effects due to “off-target” interference. In addition to the potential therapeutic benefits associated with hyperfunctional siRNA, hf-siRNA are also desirable from an economic perspective. Hyperfunctional siRNA may cost less on a per-treatment basis, thus reducing overall expenditures to both the manufacturer and the consumer.

[0388] Identification of hyperfunctional siRNA involves multiple steps that are designed to examine an individual siRNA agent's concentration- and/or longevity-profiles. In one non-limiting example, a population of siRNA directed against a single gene are first analyzed using the previously described algorithm (Formula VIII). Individual siRNA are then introduced into a test cell line and assessed for the ability to degrade the target mRNA. It is important to note that when performing this step it is not necessary to test all of the siRNA. Instead, it is sufficient to test only those siRNA having the highest SMARTSCORES™, or siRNA ranking (i.e., SMARTSCORES™, or siRNA ranking >−10). Subsequently, the gene silencing data is plotted against the SMARTSCORES™, or siRNA rankings (see FIG. 9). siRNA that (I) induce a high degree of gene silencing (i.e., they induce greater than 80% gene knockdown) and (2) have superior SMARTSCORES™ (i.e., a SMARTSCORE™, or siRNA ranking, of >−10, suggesting a desirable average internal stability profile) are selected for further investigations designed to better understand the molecule's potency and longevity. In one, non-limiting study dedicated to understanding a molecule's potency, an siRNA is introduced into one (or more) cell types in increasingly diminishing concentrations (e.g., 3.0-0.3 nM). Subsequently, the level of gene silencing induced by each concentration is examined and siRNA that exhibit hyperfunctional potency (i.e., those that induce 80% silencing or greater at, e.g., picomolar concentrations) are identified. In a second study, the longevity profiles of siRNA having high (>−10) SMARTSCORES™, or siRNA rankings and greater than 80% silencing are examined. In one non-limiting example of how this is achieved, siRNA are introduced into a test cell line and the levels of RNAi are measured over an extended period of time (e.g., 24-168 hrs). siRNAs that exhibit strong RNA interference patterns (i.e., >80% interference) for periods of time greater than, e.g., 120 hours, are thus identified. Studies similar to those described above can be performed on any and all of the >106 siRNA included in this document to further define the most functional molecule for any given gene. Molecules possessing one or both properties (extended longevity and heightened potency) are labeled “hyperfunctional siRNA,” and earmarked as candidates for future therapeutic studies.

[0389] While the example(s) given above describe one means by which hyperfunctional siRNA can be isolated, neither the assays themselves nor the selection parameters used are rigid and can vary with each family of siRNA. Families of siRNA include siRNAs directed against a single gene, or directed against a related family of genes.

[0390] The highest quality siRNA achievable for any given gene may vary considerably. Thus, for example, in the case of one gene (gene X), rigorous studies such as those described above may enable the identification of an siRNA that, at picomolar concentrations, induces 99⁺% silencing for a period of 10 days. Yet identical studies of a second gene (gene Y) may yield an siRNA that at high nanomolar concentrations (e.g., 100 nM) induces only 75% silencing for a period of 2 days. Both molecules represent the very optimum siRNA for their respective gene targets and therefore are designated “hyperfunctional.” Yet due to a variety of factors including but not limited to target concentration, siRNA stability, cell type, off-target interference, and others, equivalent levels of potency and longevity are not achievable. Thus, for these reasons, the parameters described in the before mentioned assays can vary. While the initial screen selected siRNA that had SMARTSCORES™ above −10 and a gene silencing capability of greater than 80%, selections that have stronger (or weaker) parameters can be implemented. Similarly, in the subsequent studies designed to identify molecules with high potency and longevity, the desired cutoff criteria (i.e., the lowest concentration that induces a desirable level of interference, or the longest period of time that interference can be observed) can vary. The experimentation subsequent to application of the rational criteria of this application is significantly reduced where one is trying to obtain a suitable hyperfunctional siRNA for, for example, therapeutic use. When, for example, the additional experimentation of the type described herein is applied by one skilled in the art with this disclosure in hand, a hyperfunctional siRNA is readily identified.

[0391] The siRNA may be introduced into a cell by any method that is now known or that comes to be known and that from reading this disclosure, persons skilled in the art would determine would be useful in connection with the present invention in enabling siRNA to cross the cellular membrane. These methods include, but are not limited to, any manner of transfection, such as, for example, transfection employing DEAE-Dextran, calcium phosphate, cationic lipids/liposomes, micelles, manipulation of pressure, microinjection, electroporation, immunoporation, use of vectors such as viruses, plasmids, cosmids, bacteriophages, cell fusions, and coupling of the polynucleotides to specific conjugates or ligands such as antibodies, antigens, or receptors, passive introduction, adding moieties to the siRNA that facilitate its uptake, and the like.

[0392] Having described the invention with a degree of particularity, examples will now be provided. These examples are not intended to and should not be construed to limit the scope of the claims in any way.

### EXAMPLES

### General Techniques and Nomenclatures

[0393] siRNA nomenclature. All siRNA duplexes are referred to by sense strand. The first nucleotide of the 5′-end of the sense strand is position 1, which corresponds to position 19 of the antisense strand for a 19-mer. In most cases, to compare results from different experiments, silencing was determined by measuring specific transcript mRNA levels or enzymatic activity associated with specific transcript levels, 24 hours post-transfection, with siRNA concentrations held constant at 100 nM. For all experiments, unless otherwise specified, transfection efficiency was ensured to be over 95%, and no detectable cellular toxicity was observed. The following system of nomenclature was used to compare and report siRNA-silencing functionality: “F” followed by the degree of minimal knockdown. For example, F50 signifies at least 50% knockdown, F80 means at least 80%, and so forth. For this study, all sub-F50 siRNAs were considered non-functional.

[0394] Cell culture and transfection. 96-well plates are coated with 50 μl of 50 mg/ml poly-L-lysine (Sigma) for 1 hr, and then washed 3× with distilled water before being dried for 20 min. HEK293 cells or HEK293Lucs or any other cell type of interest are released from their solid support by trypsinization, diluted to 3.5×10⁵ cells/ml, followed by the addition of 100 μL of cells/well. Plates are then incubated overnight at 37° C., 5% CO₂. Transfection procedures can vary widely depending on the cell type and transfection reagents. In one non-limiting example, a transfection mixture consisting of 2 mL Opti-MEM I (Gibco-BRL), 80 μl Lipofectamine 2000 (Invitrogen), 15 μL SUPERNasin at 20 U/μl (Ambion), and 1.5 μl of reporter gene plasmid at 1 μg/μl is prepared in 5-ml polystyrene round bottom tubes. One hundred μl of transfection reagent is then combined with 100 μl of siRNAs in polystyrene deep-well titer plates (Beckman) and incubated for 20 to 30 min at room temperature. Five hundred and fifty microliters of Opti-MEM is then added to each well to bring the final siRNA concentration to 1100 nM. Plates are then sealed with parafilm and mixed. Media is removed from HEK293 cells and replaced with 95 oil of transfection mixture. Cells are incubated overnight at 37° C., 5% CO₂.

[0395] Quantification of gene knockdown. A variety of quantification procedures can be used to measure the level of silencing induced by siRNA or siRNA pools. In one non-limiting example: to measure mRNA levels 24 hrs post-transfection, QuantiGene branched-DNA (bDNA) kits (Bayer) (Wang, et al, Regulation of insulin preRNA splicing by glucose. Proc. Natl. Acad. Sci. USA 1997, 94:4360.) are used according to manufacturer instructions. To measure luciferase activity, media is removed from HEK293 cells 24 hrs post-transfection, and 50 μl of Steady-GLO reagent (Promega) is added. After 5 minutes, plates are analyzed on a plate reader.

### Example I

### Sequences Used to Develop the Algorithm

[0396] Anti-Firefly and anti-Cyclophilin siRNAs panels (FIG. 5a, b) sorted according to using Formula VIII predicted values. All siRNAs scoring more than 0 (formula VIII) and more then 20 (formula IX) are fully functional. All ninety sequences for each gene (and DBI) appear below in Table III.

TABLE III

| | | | |
|---|---|---|---|
| Cyclo | 1 | SEQ. ID 0032 | GUUCCAAAAACAGUGGAUA |
| Cyclo | 2 | SEQ. ID 0033 | UCCAAAAACAGUGGAUAAU |
| Cyclo | 3 | SEQ. ID 0034 | CAAAAACAGUGGAUAAUUU |
| Cyclo | 4 | SEQ. ID 0035 | AAAACAGUGGAUAAUUUUG |
| Cyclo | 5 | SEQ. ID 0036 | AACAGUGGAUAAUUUUGUG |
| Cyclo | 6 | SEQ. ID 0037 | CAGUGGAUAAUUUUGUGGC |
| Cyclo | 7 | SEQ. ID 0038 | GUGGAUAAUUUUGUGGCCU |
| Cyclo | 8 | SEQ. ID 0039 | GGAUAAUUUUGUGGCCUUA |
| Cyclo | 9 | SEQ. ID 0040 | AUAAUUUUGUGGCCUUAGC |
| Cyclo | 10 | SEQ. ID 0041 | AAUUUUGUGGCCUUAGCUA |
| Cyclo | 11 | SEQ. ID 0042 | UUUUGUGGCCUUAGCUACA |
| Cyclo | 12 | SEQ. ID 0043 | UUGUGGCCUUAGCUACAGG |
| Cyclo | 13 | SEQ. ID 0044 | GUGGCCUUAGCUACAGGAG |
| Cyclo | 14 | SEQ. ID 0045 | GGCCUUAGCUACAGGAGAG |
| Cyclo | 15 | SEQ. ID 0046 | CCUUAGCUACAGGAGAGAA |
| Cyclo | 16 | SEQ. ID 0047 | UUAGCUACAGGAGAGAAAG |
| Cyclo | 17 | SEQ. ID 0048 | AGCUACAGGAGACAAACCA |
| Cyclo | 18 | SEQ. ID 0049 | CUACAGGAGAGAAAGGAUU |
| Cyclo | 19 | SEQ. ID 0050 | ACAGGAGAGAAAGGAUUUG |
| Cyclo | 20 | SEQ. ID 0051 | AGGAGAGAAAGGAUUUGGC |
| Cyclo | 21 | SEQ. ID 0052 | GAGAGAAAGGAUUUGGCUA |
| Cyclo | 22 | SEQ. ID 0053 | GAGAAAGGAUUUGGCUACA |
| Cyclo | 23 | SEQ. ID 0054 | GAAAGGAUUUGGCUACAAA |
| Cyclo | 24 | SEQ. ID 0055 | AAGGAUUUGGCUACAAAAA |
| Cyclo | 25 | SEQ. ID 0056 | GGAUUUGGCUACAAAAACA |
| Cyclo | 26 | SEQ. ID 0057 | AUUUGGCUACAAAAACAGC |
| Cyclo | 27 | SEQ. ID 0058 | UUGGCUACAAAAACAGCAA |
| Cyclo | 28 | SEQ. ID 0059 | GGCUACAAAAACAGCAAAU |
| Cyclo | 29 | SEQ. ID 0060 | CUACAAAAACAGCAAAUUC |
| Cyclo | 30 | SEQ. ID 0061 | ACAAAAACAGCAAAUUCCA |
| Cyclo | 31 | SEQ. ID 0062 | AAAAACAGCAAAUUCCAUC |
| Cyclo | 32 | SEQ. ID 0063 | AAACAGCAAAUUCCAUCGU |
| Cyclo | 33 | SEQ. ID 0064 | ACAGCAAAUUCCAUCGUGU |
| Cyclo | 34 | SEQ. ID 0065 | AGCAAAUUCCAUCGUGUAA |
| Cyclo | 35 | SEQ. ID 0066 | CAAAUUCCAUCGUGUAAUC |
| Cyclo | 36 | SEQ. ID 0067 | AAUUCCAUCGUGUAAUCAA |
| Cyclo | 37 | SEQ. ID 0068 | UUCCAUCGUGUAAUCAAGG |
| Cyclo | 38 | SEQ. ID 0069 | CCAUCGUGUAAUCAACGAC |
| Cyclo | 73 | SEQ. ID 0104 | AGCAUCUACGGUGAGCGCU |
| Cyclo | 74 | SEQ. ID 0105 | CAUCUACGGUGAGCGCUUC |
| Cyclo | 75 | SEQ. ID 0106 | UCUACGGUGAGCGCUUCCC |
| Cyclo | 76 | SEQ. ID 0107 | UACGGUGAGCGCUUCCCCG |
| Cyclo | 77 | SEQ. ID 0108 | CGGUGAGCGCUUCCCCGAU |
| Cyclo | 78 | SEQ. ID 0109 | GUGAGCGCUUCCCCGAUGA |
| Cyclo | 79 | SEQ. ID 0110 | GAGCGCUUCCCCGAUGAGA |
| Cyclo | 80 | SEQ. ID 0111 | GCGCUUCCCCGAUGAGAAC |
| Cyclo | 81 | SEQ. ID 0112 | GCUUCCCCGAUGAGAACUU |
| Cyclo | 82 | SEQ. ID 0113 | UUCCCCGAUGAGAACUUCA |
| Cyclo | 83 | SEQ. ID 0114 | CCCCGAUGAGAACUUCAAA |
| Cyclo | 84 | SEQ. ID 0115 | CCGAUGAGAACUUCAAACU |
| Cyclo | 85 | SEQ. ID 0116 | GAUGAGAACUUCAAACUGA |
| Cyclo | 86 | SEQ. ID 0117 | UGAGAACUUCAAACUGAAG |
| Cyclo | 87 | SEQ. ID 0118 | AGAACUUCAAACUGAAGCA |
| Cyclo | 88 | SEQ. ID 0119 | AACUUCAAACUGAAGCACU |
| Cyclo | 89 | SEQ. ID 0120 | CUUCAAACUGAAGCACUAC |
| Cyclo | 90 | SEQ. ID 0121 | UCAAACUGAAGCACUACGG |
| DB | 1 | SEQ. ID 0122 | ACGGGCAAGGCCAAGUGGG |
| DB | 2 | SEQ. ID 0123 | CGGGCAAGGCCAAGUGGGA |
| DB | 3 | SEQ. ID 0124 | GGGCAAGGCCAAGUGGGAU |
| DB | 4 | SEQ. ID 0125 | GGCAAGGCCAAGUGGGAUG |
| DB | 5 | SEQ. ID 0126 | GCAAGGCCAAGUGGGAUGC |
| DB | 6 | SEQ. ID 0127 | CAAGGCCAAGUGGGAUGCC |
| DB | 7 | SEQ. ID 0128 | AAGGCCAAGUGGGAUGCCU |
| DB | 8 | SEQ. ID 0129 | AGGCCAAGUGGGAUGCCUG |
| DB | 9 | SEQ. ID 0130 | GGCCAAGUGGGAUGCCUGG |
| DB | 10 | SEQ. ID 0131 | GCCAAGUGGGAUGCCUGGA |
| DB | 11 | SEQ. ID 0132 | CCAAGUGGGAUGCCUGGAA |
| DB | 12 | SEQ. ID 0133 | CAAGUGGGAUGCCUGGAAU |
| DB | 13 | SEQ. ID 0134 | AAGUGGGAUCCCUGGAAUG |
| DB | 14 | SEQ. ID 0135 | AGUGGGAUGCCUGGAAUGA |
| DB | 15 | SEQ. ID 0136 | GUGGGAUGCCUGGAAUGAG |
| DB | 16 | SEQ. ID 0137 | UGGGAUGCCUGGAAUGAGC |
| DB | 17 | SEQ. ID 0138 | GGGAUGCCUGGAAUGAGCU |
| DB | 18 | SEQ. ID 0139 | GGAUGCCUGGAAUGAGCUG |
| DB | 19 | SEQ. ID 0140 | GAUGCCUGGAAUGAGCUGA |
| DB | 20 | SEQ. ID 0141 | AUGCCUGGAAUGAGCUGAA |
| DB | 21 | SEQ. ID 0142 | UGCCUGGAAUGAGCUGAAA |
| DB | 22 | SEQ. ID 0143 | GCCUGGAAUGAGCUGAAAG |
| DB | 23 | SEQ. ID 0144 | CCUGGAAUGAGCUGAAAGG |
| DB | 24 | SEQ. ID 0145 | CUGGAAUGAGCUGAAAGGG |
| DB | 25 | SEQ. ID 0146 | UGGAAUGAGCUGAAAGGGA |
| DB | 26 | SEQ. ID 0147 | GGAAUGAGCUGAAAGGGAC |
| DB | 27 | SEQ. ID 0148 | GAAUGAGCUGAAAGGGACU |
| DB | 28 | SEQ. ID 0149 | AAUGAGCUGAAAGGGACUU |
| DB | 29 | SEQ. ID 0150 | AUGAGCUGAAAGGGACUUC |
| DB | 30 | SEQ. ID 0151 | UGAGCUGAAAGGGACUUCC |
| DB | 31 | SEQ. ID 0152 | GAGCUGAAAGGGACUUCCA |
| DB | 32 | SEQ. ID 0153 | AGCUGAAAGGGACUUCCAA |
| DB | 33 | SEQ. ID 0154 | GCUGAAAGGGACUUCCAAG |
| DB | 34 | SEQ. ID 0155 | CUGAAAGGGACUUCCAAGG |
| DB | 35 | SEQ. ID 0156 | UGAAAGGGACUUCCAAGGA |
| DB | 36 | SEQ. ID 0157 | GAAAGGGACUUCCAAGGAA |
| DB | 37 | SEQ. ID 0158 | AAAGGGACUUCCAAGGAAG |
| DB | 38 | SEQ. ID 0159 | AAGGGACUUCCAAGGAAGA |
| DB | 39 | SEQ. ID 0160 | AGGGACUUCCAAGGAAGAU |
| DB | 40 | SEQ. ID 0161 | GGGACUUCCAAGGAAGAUG |
| DB | 41 | SEQ. ID 0162 | GGACUUCCAAGGAAGAUGC |
| DB | 42 | SEQ. ID 0163 | GACUUCCAAGGAAGAUGCC |
| DB | 43 | SEQ. ID 0164 | ACUUCCAAGGAAGAUGCCA |
| DB | 44 | SEQ. ID 0165 | CUUCCAAGGAAGAUGCCAU |
| DB | 45 | SEQ. ID 0166 | UUCCAAGGAAGAUGCCAUG |
| DB | 46 | SEQ. ID 0167 | UCCAAGGAAGAUGCCAUGA |
| DB | 47 | SEQ. ID 0168 | CCAAGGAAGAUGCCAUGAA |
| DB | 48 | SEQ. ID 0169 | CAAGGAAGAUGCCAUGAAA |
| DB | 49 | SEQ. ID 0170 | AAGGAAGAUGCCAUGAAAG |
| DB | 50 | SEQ. ID 0171 | AGGAAGAUGCCAUGAAAGC |
| DB | 51 | SEQ. ID 0172 | GGAAGAUGCCAUGAAAGCU |
| DB | 52 | SEQ. ID 0173 | GAAGAUGCCAUGAAAGCUU |
| DB | 53 | SEQ. ID 0174 | AAGAUGCCAUGAAAGCUUA |
| DB | 54 | SEQ. ID 0175 | AGAUGCCAUGAAAGCUUAC |
| DB | 55 | SEQ. ID 0176 | GAUGCCAUGAAAGCUUACA |
| DB | 56 | SEQ. ID 0177 | AUGCCAUGAAAGCUUACAU |
| DB | 57 | SEQ. ID 0178 | UGCCAUGAAAGCUUACAUC |
| DB | 58 | SEQ. ID 0179 | GCCAUGAAAGCUUACAUCA |
| DB | 59 | SEQ. ID 0180 | CCAUGAAAGCUUACAUCAA |
| DB | 60 | SEQ. ID 0181 | CAUGAAAGCUUACAUCAAC |
| DB | 61 | SEQ. ID 0182 | AUGAAAGCUUACAUCAACA |
| DB | 62 | SEQ. ID 0183 | UGAAAGCUUACAUCAACAA |
| DB | 63 | SEQ. ID 0184 | GAAAGCUUACAUCAACAAA |
| DB | 64 | SEQ. ID 0185 | AAAGCUUACAUCAACAAAG |
| DB | 65 | SEQ. ID 0186 | AAGCUUACAUCAACAAAGU |
| DB | 66 | SEQ. ID 0187 | AGCUUACAUCAACAAAGUA |
| DB | 67 | SEQ. ID 0188 | GCUUACAUCAACAAAGUAG |
| DB | 68 | SEQ. ID 0189 | CUUACAUCAACAAAGUAGA |
| DB | 69 | SEQ. ID 0190 | UUACAUCAACAAAGUAGAA |
| DB | 70 | SEQ. ID 0191 | UACAUCAACAAAGUAGAAG |
| DB | 71 | SEQ. ID 0192 | ACAUCAACAAAGUAGAAGA |
| DB | 72 | SEQ. ID 0193 | CAUCAACAAAGUAGAAGAG |
| DB | 73 | SEQ. ID 0194 | AUCAACAAAGUAGAAGAGC |
| DB | 74 | SEQ. ID 0195 | UCAACAAAGUAGAAGAGCU |
| DB | 75 | SEQ. ID 0196 | CAACAAAGUAGAAGAGCUA |
| DB | 76 | SEQ. ID 0197 | AACAAAGUAGAAGAGCUAA |
| DB | 77 | SEQ. ID 0198 | ACAAAGUAGAAGAGCUAAA |
| DB | 78 | SEQ. ID 0199 | CAAAGUAGAAGAGCUAAAG |
| DB | 79 | SEQ. ID 0200 | AAAGUAGAAGAGCUAAAGA |
| DB | 80 | SEQ. ID 0201 | AAGUAGAAGAGCUAAAGAA |
| DB | 81 | SEQ. ID 0202 | AGUAGAAGAGCUAAAGAAA |
| DB | 82 | SEQ. ID 0203 | GUAGAAGAGCUAAAGAAAA |
| DB | 83 | SEQ. ID 0204 | UAGAAGAGCUAAAGAAAAA |
| DB | 84 | SEQ. ID 0205 | AGAAGAGCUAAAGAAAAAA |
| DB | 85 | SEQ. ID 0206 | GAAGAGCUAAAGAAAAAAU |
| DB | 86 | SEQ. ID 0207 | AAGAGCUAAAGAAAAAAUA |
| DB | 87 | SEQ. ID 0208 | AGAGCUAAAGAAAAAAUAC |
| DB | 88 | SEQ. ID 0209 | GAGCUAAAGAAAAAAUACG |
| DB | 89 | SEQ. ID 0210 | AGCUAAAGAAAAAAUACGG |
| DB | 90 | SEQ. ID 0211 | GCUAAAGAAAAAAUACGGG |
| Luc | 1 | SEQ. ID 0212 | AUCCUCAUAAAGGCCAAGA |
| Luc | 2 | SEQ. ID 0213 | AGAUCCUCAUAAAGGCCAA |
| Luc | 3 | SEQ. ID 0214 | AGAGAUCCUCAUAAAGGCC |
| Luc | 4 | SEQ. ID 0215 | AGAGAGAUCCUCAUAAAGG |
| Luc | 5 | SEQ. ID 0216 | UCAGAGAGAUCCUCAUAAA |
| Luc | 6 | SEQ. ID 0217 | AAUCAGAGAGAUCCUCAUA |
| Luc | 7 | SEQ. ID 0218 | AAAAUCAGAGAGAUCCUCA |
| Luc | 8 | SEQ. ID 0219 | GAAAAAUCAGAGAGAUCCU |
| Luc | 9 | SEQ. ID 0220 | AAGAAAAAUCAGAGAGAUC |
| Luc | 10 | SEQ. ID 0221 | GCAAGAAAAAUCAGAGAGA |
| Luc | 11 | SEQ. ID 0222 | ACGCAAGAAAAAUCAGAGA |
| Luc | 12 | SEQ. ID 0223 | CGACGCAAGAAAAAUCAGA |
| Luc | 13 | SEQ. ID 0224 | CUCGACGCAAGAAAAAUCA |
| Luc | 14 | SEQ. ID 0225 | AACUCGACGCAAGAAAAAU |
| Luc | 15 | SEQ. ID 0226 | AAAACUCGACGCAAGAAAA |
| Luc | 16 | SEQ. ID 0227 | GGAAAACUCGACGCAAGAA |
| Luc | 17 | SEQ. ID 0228 | CCGGAAAACUCGACGCAAG |
| Luc | 18 | SEQ. ID 0229 | UACCGGAAAACUCGACGCA |
| Luc | 19 | SEQ. ID 0230 | CUUACCGGAAAACUCGACG |
| Luc | 20 | SEQ. ID 0231 | GUCUUACCGGAAAACUCGA |
| Luc | 21 | SEQ. ID 0232 | AGGUCUUACCGGAAAACUC |
| Luc | 22 | SEQ. ID 0233 | AAAGGUCUUACCGGAAAAC |
| Luc | 23 | SEQ. ID 0234 | CGAAAGGUCUUACCGGAAA |
| Luc | 24 | SEQ. ID 0235 | ACCGAAAGGUCUUACCGGA |
| Luc | 25 | SEQ. ID 0236 | GUACCGAAAGGUCUUACCG |
| Luc | 26 | SEQ. ID 0237 | AAGUACCGAAAGGUCUUAC |
| Luc | 27 | SEQ. ID 0238 | CGAAGUACCGAAAGGUCUU |
| Luc | 28 | SEQ. ID 0239 | GACGAAGUACCGAAAGGUC |
| Luc | 29 | SEQ. ID 0240 | UGGACGAAGUACCGAAAGG |
| Luc | 30 | SEQ. ID 0241 | UGUGGACGAAGUACCGAAA |
| Luc | 31 | SEQ. ID 0242 | UUUGUGGACGAAGUACCGA |
| Luc | 32 | SEQ. ID 0243 | UGUUUGUGGACGAAGUACC |
| Luc | 33 | SEQ. ID 0244 | UGUGUUUGUGGACGAAGUA |
| Luc | 34 | SEQ. ID 0245 | GUUGUGUUUGUGGACGAAG |
| Luc | 35 | SEQ. ID 0246 | GAGUUGUGUUUGUGGACGA |
| Luc | 36 | SEQ. ID 0247 | AGGAGUUGUGUUUGUGGAC |
| Luc | 37 | SEQ. ID 0248 | GGAGGAGUUGUGUUUGUGG |
| Luc | 38 | SEQ. ID 0249 | GCGGAGGAGUUGUGUUUGU |
| Luc | 39 | SEQ. ID 0250 | GCGCGGAGGAGUUGUGUUU |
| Luc | 40 | SEQ. ID 0251 | UUGCGCGGAGGAGUUGUGU |
| Luc | 41 | SEQ. ID 0252 | AGUUGCGCGGAGGAGUUGU |
| Luc | 42 | SEQ. ID 0253 | AAAGUUGCGCGGAGGAGUU |
| Luc | 43 | SEQ. ID 0254 | AAAAAGUUGCGCGGAGGAG |
| Luc | 44 | SEQ. ID 0255 | CGAAAAAGUUGCGCGGAGC |
| Luc | 45 | SEQ. ID 0256 | CGCGAAAAAGUUGCGCGGA |
| Luc | 46 | SEQ. ID 0257 | ACCGCGAAAAAGUUGCGCG |
| Luc | 47 | SEQ. ID 0258 | CAACCGCGAAAAAGUUGCG |
| Luc | 48 | SEQ. ID 0259 | AACAACCGCGAAAAAGUUG |
| Luc | 49 | SEQ. ID 0260 | GUAACAACCGCGAAAAAGU |
| Luc | 50 | SEQ. ID 0261 | AAGUAACAACCGCGAAAAA |
| Luc | 51 | SEQ. ID 0262 | UCAAGUAACAACCGCGAAA |
| Luc | 52 | SEQ. ID 0263 | AGUCAAGUAACAACCGCGA |
| Luc | 53 | SEQ. ID 0264 | CCAGUCAAGUAACAACCGC |
| Luc | 54 | SEQ. ID 0265 | CGCCAGUCAAGUAACAACC |
| Luc | 55 | SEQ. ID 0266 | GUCGCCAGUCAAGUAACAA |
| Luc | 56 | SEQ. ID 0267 | ACGUCGCCAGUCAAGUAAC |
| Luc | 57 | SEQ. ID 0268 | UUACGUCGCCAGUCAAGUA |
| Luc | 58 | SEQ. ID 0269 | GAUUACGUCGCCAGUCAAG |
| Luc | 59 | SEQ. ID 0270 | UGGAUUACGUCGCCAGUCA |
| Luc | 60 | SEQ. ID 0271 | CGUGGAUUACGUCGCCAGU |
| Luc | 61 | SEQ. ID 0272 | AUCGUGGAUUACGUCGCCA |
| Luc | 62 | SEQ. ID 0273 | AGAUCGUGGAUUACGUCGC |
| Luc | 63 | SEQ. ID 0274 | AGAGAUCGUGGAUUACGUC |
| Luc | 64 | SEQ. ID 0275 | AAAGAGAUCGUGGAUUACG |
| Luc | 65 | SEQ. ID 0276 | AAAAAGAGAUCGUGGAUUA |
| Luc | 66 | SEQ. ID 0277 | GGAAAAAGAGAUCGUGGAU |
| Luc | 67 | SEQ. ID 0278 | ACGGAAAAAGAGAUCGUGG |
| Luc | 68 | SEQ. ID 0279 | UGACGGAAAAAGAGAUCGU |
| Luc | 69 | SEQ. ID 0280 | GAUGACGGAAAAAGAGAUC |
| Luc | 70 | SEQ. ID 0281 | ACGAUGACGGAAAAAGAGA |
| Luc | 71 | SEQ. ID 0282 | AGACGAUGACGGAAAAAGA |
| Luc | 72 | SEQ. ID 0283 | AAAGACGAUGACGGAAAAA |
| Luc | 73 | SEQ. ID 0284 | GGAAAGACGAUGACGGAAA |
| Luc | 74 | SEQ. ID 0285 | ACGGAAAGACGAUGACGGA |
| Luc | 75 | SEQ. ID 0286 | GCACGGAAAGACGAUGACG |
| Luc | 76 | SEQ. ID 0287 | GAGCACGGAAAGACGAUGA |
| Luc | 77 | SEQ. ID 0288 | UGGAGCACGGAAAGACGAU |
| Luc | 78 | SEQ. ID 0289 | UUUGGAGCACGGAAAGACG |
| Luc | 79 | SEQ. ID 0290 | GUUUUGGAGCACGGAAAGA |
| Luc | 80 | SEQ. ID 0291 | UUGUUUUGGACCACGGAAA |
| Luc | 81 | SEQ. ID 0292 | UGUUGUUUUGGAGCACGGA |
| Luc | 82 | SEQ. ID 0293 | GUUGUUGUUUUGGAGCACG |
| Luc | 83 | SEQ. ID 0294 | CCGUUGUUGUUUUGGAGCA |
| Luc | 84 | SEQ. ID 0295 | CGCCGUUGUUGUUUUGGAG |
| Luc | 85 | SEQ. ID 0296 | GCCGCCGUUGUUGUUUUGG |
| Luc | 86 | SEQ. ID 0297 | CCGCCGCCGUUGUUGUUUU |
| Luc | 87 | SEQ. ID 0298 | UCCCGCCGCCGUUGUUGUU |
| Luc | 88 | SEQ. ID 0299 | CUUCCCGCCGCCGUUGUUG |
| Luc | 89 | SEQ. ID 0300 | AACUUCCCGCCGCCGUUGU |
| Luc | 90 | SEQ. ID 0301 | UGAACUUCCCGCCGCCGUU |

### Example II

### Validation of the Algorithm using DBI, Luciferase, PLK, EGFR, and SEAP

[0397] The algorithm (Formula VIII) identified siRNAs for five genes, human DBI, firefly luciferase (fLuc), renilla luciferase (rLuc), human PLK, and human secreted alkaline phosphatase (SEAP). Four individual siRNAs were selected on the basis of their SMARTSCORES™ derived by analysis of their sequence using Formula VIII (all of the siRNAs would be selected with Formula IX as well) and analyzed for their ability to silence their targets' expression. In addition to the scoring, a BLAST search was conducted for each siRNA. To minimize the potential for off-target silencing effects, only those target sequences with more than three mismatches against un-related sequences were selected. Semizarov, et al. (2003) Specificity of short interfering RNA determined through gene expression signatures, Proc. Natl. Acad. Sci. USA, 100:6347. These duplexes were analyzed individually and in pools of 4 and compared with several siRNAs that were randomly selected. The functionality was measured as a percentage of targeted gene knockdown as compared to controls. All siRNAs were transfected as described by the methods above at 100 nM concentration into HEK293 using Lipofectamine 2000. The level of the targeted gene expression was evaluated by B-DNA as described above and normalized to the non-specific control. FIG. 10 shows that the siRNAs selected by the algorithm disclosed herein were significantly more potent than randomly selected siRNAs. The algorithm increased the chances of identifying an F50 siRNA from 48% to 91%, and an F80 siRNA from 13% to 57%. In addition, pools of SMART siRNA silence the selected target better than randomly selected pools (see FIG. 10F).

### Example III

### Validation of the Algorithm Using Genes Involved in Clathrin-Dependent Endocytosis

[0398] Components of clathrin-mediated endocytosis pathway are key to modulating intracellular signaling and play important roles in disease. Chromosomal rearrangements that result in fusion transcripts between the Mixed-Lineage Leukemia gene (MLL) and CALM (clathrin assembly lymphoid myeloid leukemia gene) are believed to play a role in leukemogenesis. Similarly, disruptions in Rab7 and Rab9, as well as HIP1 (Huntingtin-interacting protein), genes that are believed to be involved in endocytosis, are potentially responsible for ailments resulting in lipid storage, and neuronal diseases, respectively. For these reasons, siRNA directed against clathrin and other genes involved in the clathrin-mediated endocytotic pathway are potentially important research and therapeutic tools.

[0399] siRNAs directed against genes involved in the clathrin-mediated endocytosis pathways were selected using Formula VIII. The targeted genes were clathrin heavy chain (CHC, accession #NM_{—}004859), clathrin light chain A (CLCa, NM_{—}001833), clathrin light chain B (CLCb, NM_{—}001834), CALM (U45976), β2 subunit of AP-2 (β2, NM_{—}001282), Eps15 (NM_{—}001981), Eps15R (NM_{—}021235), dynamin II (DYNII, NM_{—}004945), Rab5a (BC001267), Rab5b (NM_{—}002868), Rab5c (AF141304), and EEA.1 (XM_{—}018197).

[0400] For each gene, four siRNAs duplexes with the highest scores were selected and a BLAST search was conducted for each of them using the Human EST database. In order to minimize the potential for off-target silencing effects, only those sequences with more than three mismatches against un-related sequences were used. All duplexes were synthesized at Dharmacon, Inc. as 21-mers with 3′-UU overhangs using a modified method of 2′-ACE chemistry, Scaringe (2000) Advanced 5′-silyl-2′-orthoester approach to RNA oligonucleotide synthesis, Methods Enzymol. 317:3, and the antisense strand was chemically phosphorylated to insure maximized activity.

[0401] HeLa cells were grown in Dulbecco's modified Eagle's medium (DMEM) containing 10% fetal bovine serum, antibiotics and glutamine. siRNA duplexes were resuspended in 1×siRNA Universal buffer (Dharmacon, Inc.) to 20 μM prior to transfection. HeLa cells in 12-well plates were transfected twice with 4 μl of 20 μM siRNA duplex in 3 μl Lipofectamine 2000 reagent (Invitrogen, Carlsbad, Calif., USA) at 24-hour intervals. For the transfections in which 2 or 3 siRNA duplexes were included, the amount of each duplex was decreased, so that the total amount was the same as in transfections with single siRNAs. Cells were plated into normal culture medium 12 hours prior to experiments, and protein levels were measured 2 or 4 days after the first transfection.

[0402] Equal amounts of lysates were resolved by electrophoresis, blotted, and stained with the antibody specific to targeted protein, as well as antibodies specific to unrelated proteins, PP1 phosphatase and Tsg101 (not shown). The cells were lysed in Triton X-100/glycerol solubilization buffer as described previously. Tebar, Bohlander, & Sorkin (1999) Clathrin Assembly Lymphoid Myeloid Leukemia (CALM) Protein: Localization in Endocytic-coated Pits, Interactions with Clathrin, and the Impact of Overexpression on Clathrin-mediated Traffic, Mol. Biol. Cell, 10:2687. Cell lysates were electrophoresed, transferred to nitrocellulose membranes, and Western blotting was performed with several antibodies followed by detection using enhanced chemiluminescence system (Pierce, Inc). Several x-ray films were analyzed to determine the linear range of the chemiluminescence signals, and the quantifications were performed using densitometry and AlphaImager v5.5 software (Alpha Innotech Corporation). In experiments with Eps15R-targeted siRNAs, cell lysates were subjected to immunoprecipitation with Ab860, and Eps15R was detected in immunoprecipitates by Western blotting as described above.

[0403] The antibodies to assess the levels of each protein by Western blot were obtained from the following sources: monoclonal antibody to clathrin heavy chain (TD.1) was obtained from American Type Culture Collection (Rockville, Md., USA); polyclonal antibody to dynamin II was obtained from Affinity Bioreagents, Inc. (Golden, Colo., USA); monoclonal antibodies to EEA.1 and Rab5a were purchased from BD Transduction Laboratories (Los Angeles, Calif., USA); the monoclonal antibody to Tsg101 was purchased from Santa Cruz Biotechnology, Inc. (Santa Cruz, Calif., USA); the monoclonal antibody to GFP was from ZYMED Laboratories Inc. (South San Francisco, Calif., USA); the rabbit polyclonal antibodies Ab32 specific to α-adaptins and Ab20 to CALM were described previously (Sorkin et al. (1995) Stoichiometric Interaction of the Epidermal Growth Factor Receptor with the Clathrin-associated Protein Complex AP-2, J. Biol. Chem., 270:619), the polyclonal antibodies to clathrin light chains A and B were kindly provided by Dr. F. Brodsky (UCSF); monoclonal antibodies to PP1 (BD Transduction Laboratories) and α-Actinin (Chemicon) were kindly provided by Dr. M. Dell'Acqua (University of Colorado); Eps15 Ab577 and Eps15R Ab860 were kindly provided by Dr. P. P. Di Fiore (European Cancer Institute).

[0404] FIG. 11 demonstrates the in vivo functionality of 48 individual siRNAs, selected using Formula VIII (most of them will meet the criteria incorporated by Formula IX as well) targeting 12 genes. Various cell lines were transfected with siRNA duplexes (Dup1-4) or pools of siRNA duplexes (Pool), and the cells were lysed 3 days after transfection with the exception of CALM (2 days) and P2 (4 days).

[0405] Note a β1-adaptin band (part of AP-1 Golgi adaptor complex) that runs slightly slower than β2 adaptin. CALM has two splice variants, 66 and 72 kD. The full-length Eps15R (a doublet of ˜130 kD) and several truncated spliced forms of ˜100 kD and ˜70 kD were detected in Eps15R immunoprecipitates (shown by arrows). The cells were lysed 3 days after transfection. Equal amounts of lysates were resolved by electrophoresis and blotted with the antibody specific to a targeted protein (GFP antibody for YFP fusion proteins) and the antibody specific to unrelated proteins PP1 phosphatase or α-actinin, and TSG101. The amount of protein in each specific band was normalized to the amount of non-specific proteins in each lane of the gel. Nearly all of them appear to be functional, which establishes that Formula VIII and IX can be used to predict siRNAs' functionality in general in a genome wide manner.

[0406] To generate the fusion of yellow fluorescent protein (YFP) with Rab5b or Rab5c (YFP-Rab5b or YFP-Rab5c), a DNA fragment encoding the full-length human Rab5b or Rab5c was obtained by PCR using Pfu polymerase (Stratagene) with a SacI restriction site introduced into the 5′ end and a KpnI site into the 3′ end and cloned into pEYFP-C1 vector (CLONTECH, Palo Alto, Calif., USA). GFP-CALM and YFP-Rab5a were described previously (Tebar, Bohlander, & Sorkin (1999) Clathrin Assembly Lymphoid Myeloid Leukemia (CALM) Protein: Localization in Endocytic-coated Pits, Interactions with Clathrin, and the Impact of Overexpression on Clathrin-mediated Traffic, Mol. Biol. Cell 10:2687).

### Example IV

### Validation of the Algorithm Using Eg5, GAPDH, ATE1, MEK2, MEK1, QB, Lamin A/C, c-myc, Human Cyclophilin, and Mouse Cyclophilin

[0407] A number of genes have been identified as playing potentially important roles in disease etiology. Expression profiles of normal and diseased kidneys has implicated Edg5 in immunoglobulin A neuropathy, a common renal glomerular disease. Myc1, MEK1/2 and other related kinases have been associated with one or more cancers, while lamins have been implicated in muscular dystrophy and other diseases. For these reasons, siRNA directed against the genes encoding these classes of molecules would be important research and therapeutic tools.

[0408] FIG. 12 illustrates four siRNAs targeting 10 different genes (Table V for sequence and accession number information) that were selected according to the Formula VIII and assayed as individuals and pools in HEK293 cells. The level of siRNA induced silencing was measured using the B-DNA assay. These studies demonstrated that thirty-six out of the forty individual SMART-selected siRNA tested are functional (90%) and all 10 pools are fully functional.

### Example V

### Validation of the Algorithm Using Bcl2

[0409] Bcl-2 is a ˜25 kD, 205-239 amino acid, anti-apoptotic protein that contains considerable homology with other members of the BCL family including BCLX, MCL1, BAX, BAD, and BIK. The protein exists in at least two forms (Bcl2a, which has a hydrophobic tail for membrane anchorage, and Bcl2b, which lacks the hydrophobic tail) and is predominantly localized to the mitochondrial membrane. While Bcl2 expression is widely distributed, particular interest has focused on the expression of this molecule in B and T cells. Bcl2 expression is down-regulated in normal germinal center B cells yet in a high percentage of follicular lymphomas, Bcl2 expression has been observed to be elevated. Cytological studies have identified a common translocation ((14; 18)(q32;q32)) amongst a high percentage (>70%) of these lymphomas. This genetic lesion places the Bcl2 gene in juxtaposition to immunoglobulin heavy chain gene (IgH) encoding sequences and is believed to enforce inappropriate levels of gene expression, and resistance to programmed cell death in the follicle center B cells. In other cases, hypomethylation of the Bcl2 promoter leads to enhanced expression and again, inhibition of apoptosis. In addition to cancer, dysregulated expression of Bcl-2 has been correlated with multiple sclerosis and various neurological diseases.

[0410] The correlation between Bcl-2 translocation and cancer makes this gene an attractive target for RNAi. Identification of siRNA directed against the bcl2 transcript (or Bcl2-IgH fusions) would further our understanding Bcl2 gene function and possibly provide a future therapeutic agent to battle diseases that result from altered expression or function of this gene.

In Silico Identification of Functional siRNA

[0411] To identify functional and hyperfunctional siRNA against the Bcl2 gene, the sequence for Bcl-2 was downloaded from the NCBI Unigene database and analyzed using the Formula VIII algorithm. As a result of these procedures, both the sequence and SMARTSCORES™, or siRNA rankings of the Bcl2 siRNA were obtained and ranked according to their functionality. Subsequently, these sequences were BLAST'ed (database) to insure that the selected sequences were specific and contained minimal overlap with unrelated genes. The SMARTSCORES™, or siRNA rankings for the top 10 Bcl-2 siRNA are identified in FIG. 13.

In Vivo Testing of Bcl-2 siRNA

[0412] Bcl-2 siRNAs having the top ten SMARTSCORES™, or siRNA rankings were selected and tested in a functional assay to determine silencing efficiency. To accomplish this, each of the ten duplexes were synthesized using 2′-O-ACE chemistry and transfected at 100 nM concentrations into cells. Twenty-four hours later assays were performed on cell extracts to assess the degree of target silencing. Controls used in these experiments included mock transfected cells, and cells that were transfected with a non-specific siRNA duplex.

[0413] The results of these experiments are presented below (and in FIG. 14) and show that all ten of the selected siRNA induce 80% or better silencing of the Bcl2 message at 100 nM concentrations. These data verify that the algorithm successfully identified functional Bcl2 siRNA and provide a set of functional agents that can be used in experimental and therapeutic environments.

| | | |
|---|---|---|
| siRNA 1 | GGGAGAUAGUGAUGAAGUA | SEQ. ID NO. 302 |
| siRNA 2 | GAAGUACAUCCAUUAUAAG | SEQ. ID NO. 303 |
| siRNA 3 | GUACGACAACCGGGAGAUA | SEQ. ID NO. 304 |
| siRNA 4 | AGAUAGUGAUGAAGUACAU | SEQ. ID NO. 305 |
| siRNA 5 | UGAAGACUCUGCUCAGUUU | SEQ. ID NO. 306 |
| siRNA 6 | GCAUGCGGCCUCUGUUUGA | SEQ. ID NO. 307 |
| siRNA 7 | UGCGGCCUCUGUUUGAUUU | SEQ. ID NO. 308 |
| siRNA 8 | GAGAUAGUGAUGAAGUACA | SEQ. ID NO. 309 |
| siRNA 9 | GGAGAUAGUGAUGAAGUAC | SEQ. ID NO. 310 |
| siRNA 10 | GAAGACUCUGCUCAGUUUG | SEQ. ID NO. 311 |

[0414] Bcl2 siRNA: Sense Strand, 5′→3′

### Example VI

### Sequences Selected by the Algorithm

[0415] Sequences of the siRNAs selected using Formulas (Algorithms) VIII and IX with their corresponding ranking, which have been evaluated for the silencing activity in vivo in the present study (Formula VIII and IX, respectively) are shown in Table V. It should be noted that the “t” residues in Table V, and elsewhere, when referring to siRNA, should be replaced by “u” residues.

TABLE V

| | | | | | |
|---|---|---|---|---|---|
| | | | | FORMULA | FORMULA |
| GENE | Name | SEQ. ID No. | FTLLSEQTENCE | VIII | IX |

| | | | | | |
|---|---|---|---|---|---|
| CLTC | NM_004859 | 0312 | GAAAGAATCTGTAGAGAAA | 76 | 94.2 |
| CLTC | NM_004859 | 0313 | GCAATGAGCTGTTTGAAGA | 65 | 39.9 |
| CLTC | NM_004859 | 0314 | TGACAAAGGTGGATAAATT | 57 | 38.2 |
| CLTC | NM_004859 | 0315 | GGAAATGGATCTCTTTGAA | 54 | 49.4 |
| CLTA | NM_001833 | 0316 | GGAAAGTAATGGTCCAACA | 22 | 55.5 |
| CLTA | NM_001833 | 0317 | AGACAGTTATGCAGCTATT | 4 | 22.9 |
| CLTA | NM_001833 | 0318 | CCAATTCTCGGAAGCAAGA | 1 | 17 |
| CLTA | NM_001833 | 0319 | GAAAGTAATGGTCCAACAG | −1 | −13 |
| CLTB | NM_001834 | 0320 | GCGCCAGAGTGAACAAGTA | 17 | 57.5 |
| CLTB | NM_001834 | 0321 | GAAGGTGGCCCAGCTATGT | 15 | −8.6 |
| CLTB | NM_001834 | 0322 | GGAACCAGCGCCAGAGTGA | 13 | 40.5 |
| CLTB | NM_001834 | 0323 | GAGCGAGATTGCAGGCATA | 20 | 61.7 |
| CALM | U45976 | 0324 | GTTAGTATCTGATGACTTG | 36 | −34.6 |
| CALM | 045976 | 0325 | GAAATGGAACCACTAAGAA | 33 | 46.1 |
| CALM | U45976 | 0326 | GGAAATGGAACCACTAAGA | 30 | 61.2 |
| CALM | 045976 | 0327 | CAACTACACTTTCCAATGC | 28 | 6.8 |
| EPS15 | NM_001981 | 0328 | CCACCAAGATTTCATGATA | 48 | 25.2 |
| EPS15 | NM_001981 | 0329 | GATCGGAACTCCAACAAGA | 43 | 49.3 |
| EPS15 | NM_001981 | 0330 | AAACGGAGCTACAGATTAT | 39 | 11.5 |
| EPS15 | NM_001981 | 0331 | CCACACAGCATTCTTGTAA | 33 | −23.6 |
| EPS15R | NM_021235 | 0332 | GAAGTTACCTTGAGCAATC | 48 | 33 |
| EPS15R | NM_021235 | 0333 | GGACTTGGCCGATCCAGAA | 27 | 33 |
| EPS15R | NM_021235 | 0334 | GCACTTGGATCGAGATGAG | 20 | 1.3 |
| EPS15R | NM_021235 | 0335 | CAAAGACCAATTCGCGTTA | 17 | 27.7 |
| DNM2 | NM_004945 | 0336 | CCGAATCAATCGCATCTTC | 6 | −29.6 |
| DNM2 | NM_004945 | 0337 | GACATGATCCTGCAGTTCA | 5 | −14 |
| DNM2 | NM_004945 | 0338 | GAGCGAATCGTCACCACTT | 5 | 24 |
| DNM2 | NM_004945 | 0339 | CCTCCGAGCTGGCGTCTAC | −4 | −63.6 |
| ARF6 | AF93885 | 0340 | TCACATGGTTAACCTCTAA | 27 | −21.1 |
| ARF6 | AF93885 | 0341 | GATGAGGGACGCCATAATC | 7 | −38.4 |
| ARF6 | AF93885 | 0342 | CCTCTAACTACAAATCTTA | 4 | 16.9 |
| ARF6 | AF93885 | 0343 | GGAAGGTGCTATCCAAAAT | 4 | 11.5 |
| RAB5A | BC001267 | 0344 | GCAAGCAAGTCCTAACATT | 40 | 25.1 |
| RAB5A | BC001267 | 0345 | GGAAGAGGAGTAGACCTTA | 17 | 50.1 |
| RAB5A | BC001267 | 0346 | AGGAATCAGTGTTGTAGTA | 16 | 11.5 |
| RAB5A | BC001267 | 0347 | GAAGAGGAGTAGACCTTAC | 12 | 7 |
| RAB5B | NM_002868 | 0348 | GAAAGTCAAGCCTGGTATT | 14 | 18.1 |
| RAB5B | NM_002868 | 0349 | AAAGTCAAGCCTGGTATTA | 6 | −17.8 |
| RAB5B | NM_002868 | 0350 | GCTATGAACGTGAATGATC | 3 | −21.1 |
| RAB5B | NM_002868 | 0351 | CAAGCCTGGTATTACGTTT | −7 | −37.5 |
| RAB5C | AF141304 | 0352 | GGAACAAGATCTGTCAATT | 38 | 51.9 |
| RAB5C | AF141304 | 0353 | GCAATGAACGTGAACGAAA | 29 | 43.7 |
| RAB5C | AF141304 | 0354 | CAATGAACGTGAACGAAAT | 18 | 43.3 |
| RAB5C | AF141304 | 0355 | GGACAGGAGCGGTATCACA | 6 | 18.2 |
| EEA1 | XM_018197 | 0356 | AGACAGAGCTTGAGAATAA | 67 | 64.1 |
| EEA1 | XM_018197 | 0357 | GAGAAGATCTTTATGCAAA | 60 | 48.7 |
| EEA1 | XM_018197 | 0358 | GAAGAGAAATCAGCAGATA | 58 | 45.7 |
| EEA1 | XM_018197 | 0359 | GCAAGTAACTCAACTAACA | 56 | 72.3 |
| AP2B1 | NM_001282 | 0360 | GAGCTAATCTGCCACATTG | 49 | −12.4 |
| AP2B1 | NM_001282 | 0361 | GCAGATGAGTTACTAGAAA | 44 | 48.9 |
| AP2B1 | NM_001282 | 0362 | CAACTTAATTGTCCAGAAA | 41 | 28.2 |
| AP2B1 | NM_001282 | 0363 | CAACACAGGATTCTGATAA | 33 | −5.8 |
| PLK | NM_005030 | 0364 | AGATTGTGCCTAAGTCTCT | −35 | −3.4 |
| PLK | NM_005030 | 0365 | ATGAAGATCTGGAGGTGAA | 0 | −4.3 |
| PLK | NM_005030 | 0366 | TTTGAGACTTCTTGCCTAA | −5 | −27.7 |
| PLK | NM_005030 | 0367 | AGATCACCCTCCTTAAATA | 15 | 72.3 |
| GAPDH | NM_002046 | 0368 | CAACGGATTTGGTCGTATT | 27 | −2.8 |
| GAPDH | NM_002046 | 0369 | GAAATCCCATCACCATCTT | 24 | 3.9 |
| GAPDH | NM_002046 | 0370 | GACCTCAACTACATGGTTT | 22 | −22.9 |
| GAPDH | NM_002046 | 0371 | TGGTTTACATGTTCCAATA | 9 | 9.8 |
| c-Myc | | 0372 | GAAGAAATCGATGTTGTTT | 31 | −11.7 |
| c-Myc | | 0373 | ACACAAACTTGAACAGCTA | 22 | 51.3 |
| c-Myc | | 0374 | GGAAGAAATCGATGTTGTT | 18 | 26 |
| c-Myc | | 0375 | GAAACGACGAGAACAGTTG | 18 | −8.9 |
| MAP2K1 | NM_002755 | 0376 | GCACATGGATGGAGGTTCT | 26 | 16 |
| MAP2K1 | NM_002755 | 0377 | GCAGAGAGAGCAGATTTGA | 16 | 0.4 |
| MAP2K1 | NM_002755 | 0378 | GAGGTTCTCTGGATCAAGT | 14 | 15.5 |
| MAP2K1 | NM_002755 | 0379 | GAGCAGATTTGAAGCAACT | 14 | 18.5 |
| MAP2K2 | NM_030662 | 0380 | CAAAGACGATGACTTCGAA | 37 | 26.4 |
| MAP2K2 | NM_030662 | 0381 | GATCAGCATTTGCATGGAA | 24 | −0.7 |
| MAP2K2 | NM_030662 | 0382 | TCCAGGAGTTTGTCAATAA | 17 | −4.5 |
| MAP2K2 | NM_030662 | 0383 | GGAAGCTGATCCACCTTGA | 16 | 59.2 |
| KNSL1 (EG5) | NM_004523 | 0384 | GCAGAAATCTAAGGATATA | 53 | 35.8 |
| KNSL1 (EG5) | NM_004523 | 0385 | CAACAAGGATGAAGTCTAT | 50 | 18.3 |
| KNSL1 (EG5) | NM_004523 | 0386 | CAGCAGAAATCTAAGGATA | 41 | 32.7 |
| KNSL1 (EGS) | NM_004523 | 0387 | CTAGATGGCTTTCTCAGTA | 39 | 3.9 |
| CyclophilinA | NM_021130 | 0388 | AGACAAGGTCCCAAAGACA | −16 | 58.1 |
| CyclophilinA | NM_021130 | 0389 | GGAATGGCAAGACCAGCAA | −6 | 36 |
| CyclophilinA | NM_021130 | 0390 | AGAATTATTCCAGGGTTTA | −3 | 16.1 |
| CyclophilinA | NM_021130 | 0391 | GCAGACAAGGTCCCAAAGA | 8 | 8.9 |
| LAMIN A/C | NM_170707 | 0392 | AGAAGCAGCTTCAGGATGA | 31 | 38.8 |
| LAMIN A/C | NM_170707 | 0393 | GAGCTTGACTTCCAGAAGA | 33 | 22.4 |
| LAMIN A/C | NM_170707 | 0394 | CCACCGAAGTTCACCCTAA | 21 | 27.5 |
| LAMIN A/C | NM_170707 | 0395 | GAGAAGAGCTCCTCCATCA | 55 | 30.1 |
| CyclophilinB | M60857 | 0396 | GAAAGAGCATCTACGGTGA | 41 | 83.9 |
| CyclophilinB | M60857 | 0397 | GAAAGGATTTCGCTACAAA | 53 | 59.1 |
| CyclophilinB | M60857 | 0398 | ACAGCAAATTCCATCGTGT | −20 | 28.8 |
| CyclophilinB | M60857 | 0399 | GCAAAGACTGTTCCAAAAA | 2 | 27 |
| DBI1 | NM_020548 | 0400 | CAACACGCCTCATCCTCTA | 27 | −7.6 |
| DBI2 | NM_020548 | 0401 | CATGAAAGCTTACATCAAC | 25 | −30.8 |
| DBI3 | NM_020548 | 0402 | AAGATGCCATGAAAGCTTA | 17 | 22 |
| DBI4 | NM_020548 | 0403 | GCACATACCGCCTGAGTCT | 15 | 3.9 |
| rLUC1 | | 0404 | GATCAAATCTGAAGAAGGA | 57 | 49.2 |
| rLUC2 | | 0405 | GCCAAGAAGTTTCCTAATA | 50 | 13.7 |
| rLUC3 | | 0406 | CAGCATATCTTGAACCATT | 41 | −2.2 |
| rLUC4 | | 0407 | GAACAAAGGAAACGGATGA | 39 | 29.2 |
| SeAP1 | NM_031313 | 0408 | CGGAAACGGTCCAGGCTAT | 6 | 26.9 |
| SeAP2 | NM_031313 | 0409 | GCTTCGAGCAGACATGATA | 4 | −11.2 |
| SeAP3 | NM_031313 | 0410 | CCTACACGGTCCTCCTATA | 4 | 4.9 |
| SeAP4 | NM_031313 | 0411 | GCCAAGAACCTCATCATCT | 1 | −9.9 |
| fLUC1 | | 0412 | GATATGGGCTGAATACAAA | 54 | 40.4 |
| fLUC2 | | 0413 | GCACTCTGATTCACAAATA | 47 | 54.7 |
| fLUC3 | | 0414 | TGAAGTCTCTGATTAAGTA | 46 | 34.5 |
| fLUC4 | | 0415 | TCAGACAGATCCTCATAAA | 40 | 11.4 |
| mCyclo_1 | NM_008907 | 0416 | GCAAGAAGATCACCATTTC | 52 | 46.4 |
| mCyclo_2 | NM_008907 | 0417 | GAGAGAAATTTGAGGATGA | 36 | 70.7 |
| mcyclo_3 | NM_008907 | 0418 | GAAAGGATTTGGCTATAAG | 35 | −1.5 |
| mCyclo_4 | NM_008907 | 0419 | GAAAGAAGGCATGAACATT | 27 | 10.3 |
| BCL2_1 | NM_000633 | 0420 | GGGAGATAGTGATGAAGTA | 21 | 72 |
| BCL2_2 | NM_000633 | 0421 | GAAGTACATCCATTATAAG | 1 | 3.3 |
| BCL2_3 | NM_000633 | 0422 | GTACGACAACCGGGAGATA | 1 | 35.9 |
| BCL2_4 | NM_000633 | 0423 | AGATAGTGATGAAGTACAT | −12 | 22.1 |
| BCL2_5 | NM_000633 | 0424 | TGAAGACTCTGCTCACTTT | 36 | 19.1 |
| BCL2_6 | NM_000633 | 0425 | GCATGCGGCCTCTGTTTGA | 5 | −9.7 |
| QB1 | NM_003365.1 | 0426 | GCACACAGCUUACUACAUC | 52 | −4.8 |
| QB2 | NM_003365.1 | 0427 | GAAAUGCCCUGGUAUCUCA | 49 | 22.1 |
| QB3 | NM_003365.1 | 0428 | GAAGGAACGUGAUGUGAUC | 34 | 22.9 |
| QB4 | NM_003365.1 | 0429 | GCACUACUCCUGUGUGUGA | 28 | 20.4 |
| ATE1-1 | NM_007041 | 0430 | GAACCCAGCUGGAGAACUU | 45 | 15.5 |
| ATE1-2 | NM_007041 | 0431 | GAUAUACAGUGUGAUCUUA | 40 | 12.2 |
| ATE1-3 | NM_007041 | 0432 | GUACUACGAUCCUGAUUAU | 37 | 32.9 |
| ATE1-4 | NM_007041 | 0433 | GUGCCGACCUUUACAAUUU | 35 | 18.2 |
| EGFR-1 | NM_005228 | 0434 | GAAGGAAACTGAATTCAAA | 68 | 79.4 |
| EGFR-1 | NM_005228 | 0435 | GGAAATATGTACTACGAAA | 49 | 49.5 |
| EGFR-1 | NM_005228 | 0436 | CCACAAAGCAGTGAATTTA | 41 | 7.6 |
| EGFR-1 | NM_005228 | 0437 | GTAACAAGCTCACGCAGTT | 40 | 25.9 |

[0416] Many of the genes to which the described siRNA are directed play critical roles in disease etiology. For this reason, the siRNAs listed in the sequence listing may potentially act as therapeutic agents. A number of prophetic examples follow and should be understood in view of the siRNA that are identified in the sequence listing. To isolate these siRNAs, the appropriate message sequence for each gene is analyzed using one of the before mentioned formulas (preferably formula VIII) to identify potential siRNA targets. Subsequently these targets are BLAST'ed to eliminate homology with potential off-targets.

### Example VII

### Evidence for the Benefits of Pooling

[0417] Evidence for the benefits of pooling have been demonstrated using the reporter gene, luciferase. Ninety siRNA duplexes were synthesized using Dharmacon proprietary ACE® chemistry against one of the standard reporter genes: firefly luciferase. The duplexes were designed to start two base pairs apart and to cover approximately 180 base pairs of the luciferase gene (see sequences in Table III). Subsequently, the siRNA duplexes were co-transfected with a luciferase expression reporter plasmid into HEK293 cells using standard transfection protocols and luciferase activity was assayed at 24 and 48 hours.

[0418] Transfection of individual siRNAs showed standard distribution of inhibitory effect. Some duplexes were active, while others were not. FIG. 15 represents a typical screen of ninety siRNA duplexes (SEQ. ID NO. 0032-0120) positioned two base pairs apart. As the figure suggests, the functionality of the siRNA duplex is determined more by a particular sequence of the oligonucleotide than by the relative oligonucleotide position within a gene or excessively sensitive part of the mRNA, which is important for traditional anti-sense technology.

[0419] When two continuous oligonucleotides were pooled together, a significant increase in gene silencing activity was observed (see FIGS. 16A and B). A gradual increase in efficacy and the frequency of pools functionality was observed when the number of siRNAs increased to 3 and 4 (FIGS. 16A, 16B, 17A, and 17B). Further, the relative positioning of the oligonucleotides within a pool did not determine whether a particular pool was functional (see FIGS. 18A and 18B, in which 100% of pools of oligonucleotides distanced by 2, 10 and 20 base pairs were functional).

[0420] However, relative positioning may nonetheless have an impact. An increased functionality may exist when the siRNA are positioned continuously head to toe (5′ end of one directly adjacent to the 3′ end of the others).

[0421] Additionally, siRNA pools that were tested performed at least as well as the best oligonucleotide in the pool, under the experimental conditions whose results are depicted in FIG. 19. Moreover, when previously identified non-functional and marginally (semi) functional siRNA duplexes were pooled together in groups of five at a time, a significant functional cooperative action was observed (see FIG. 20). In fact, pools of semi-active oligonucleotides were 5 to 25 times more functional than the most potent oligonucleotide in the pool. Therefore, pooling several siRNA duplexes together does not interfere with the functionality of the most potent siRNAs within a pool, and pooling provides an unexpected significant increase in overall functionality

### Example VIII

### Additional Evidence of the Benefits of Pooling

[0422] Experiments were performed on the following genes: β-galactosidase, Renilla luciferase, and Secreted alkaline phosphatase, which demonstrates the benefits of pooling. (see FIGS. 21A, 21B and 21C). Individual and pools of siRNA (described in Figure legends 21A-C) were transfected into cells and tested for silencing efficiency. Approximately 50% of individual siRNAs designed to silence the above-specified genes were functional, while 100% of the pools that contain the same siRNA duplexes were functional.

### Example IX

### Highly Functional siRNA

[0423] Pools of five siRNAs in which each two siRNAs overlap to 10-90% resulted in 98% functional entities (>80% silencing). Pools of siRNAs distributed throughout the mRNA that were evenly spaced, covering an approximate 20-2000 base pair range, were also functional. When the pools of siRNA were positioned continuously head to tail relative to mRNA sequences and mimicked the natural products of Dicer cleaved long double stranded RNA, 98% of the pools evidenced highly functional activity (>95% silencing).

### Example X

### Human Cyclophilin B

[0424] Table III above lists the siRNA sequences for the human cyclophilin B protein. A particularly functional siRNA may be selected by applying these sequences to any of Formula I to VII above.

[0425] Alternatively, one could pool 2, 3, 4, 5 or more of these sequences to create a kit for silencing a gene. Preferably, within the kit there would be at least one sequence that has a relatively high predicted functionality when any of Formulas I-VII is applied.

### Example XI

### Sample Pools of siRNAs and their Application to Human Disease

[0426] The genetic basis behind human disease is well documented and siRNA may be used as both research or diagnostic tools and therapeutic agents, either individually or in pools. Genes involved in signal transduction, the immune response, apoptosis, DNA repair, cell cycle control, and a variety of other physiological functions have clinical relevance and therapeutic agents that can modulate expression of these genes may alleviate some or all of the associated symptoms. In some instances, these genes can be described as a member of a family or class of genes and siRNA (randomly, conventionally, or rationally designed) can be directed against one or multiple members of the family to induce a desired result.

[0427] To identify rationally designed siRNA to each gene, the sequence was analyzed using Formula VIII or Formula X to identify rationally designed siRNA. To confirm the activity of these sequences, the siRNA are introduced into a cell type of choice (e.g., HeLa cells, HEK293 cells) and the levels of the appropriate message are analyzed using one of several art proven techniques. siRNA having heightened levels of potency can be identified by testing each of the before mentioned duplexes at increasingly limiting concentrations. Similarly, siRNA having increased levels of longevity can be identified by introducing each duplex into cells and testing functionality at 24, 48, 72, 96, 120, 144, 168, and 192 hours after transfection. Agents that induce >95% silencing at sub-nanomolar concentrations and/or induce functional levels of silencing for >96 hours are considered hyperfunctional.

### Example XII

### Validation of Multigene Knockout Using Rab5 and Eps

[0428] Two or more genes having similar, overlapping functions often leads to genetic redundancy. Mutations that knockout only one of, e.g., a pair of such genes (also referred to as homologs) results in little or no phenotype due to the fact that the remaining intact gene is capable of fulfilling the role of the disrupted counterpart. To fully understand the function of such genes in cellular physiology, it is often necessary to knockout or knockdown both homologs simultaneously. Unfortunately, concomitant knockdown of two or more genes is frequently difficult to achieve in higher organisms (e.g., mice) thus it is necessary to introduce new technologies dissect gene function. One such approach to knocking down multiple genes simultaneously is by using siRNA. For example, FIG. 11 showed that rationally designed siRNA directed against a number of genes involved in the clathrin-mediated endocytosis pathway resulted in significant levels of protein reduction (e.g., >80%). To determine the effects of gene knockdown on clathrin-related endocytosis, internalization assays were performed using epidermal growth factor and transferrin. Specifically, mouse receptor-grade EGF (Collaborative Research Inc.) and iron-saturated human transferrin (Sigma) were iodinated as described previously (Jiang, X., Huang, F., Marusyk, A. & Sorkin, A. (2003) Mol Biol Cell 14, 858-70). HeLa cells grown in 12-well dishes were incubated with ¹²⁵I-EGF (1 ng/ml) or ¹²⁵I-transferrin (1 μg/ml) in binding medium (DMEM, 0.1% bovine serum albumin) at 37° C., and the ratio of internalized and surface radioactivity was determined during 5-min time course to calculate specific internalization rate constant kₑ as described previously (Jiang, X et al.). The measurements of the uptakes of radiolabeled transferrin and EGF were performed using short time-course assays to avoid influence of the recycling on the uptake kinetics, and using low ligand concentration to avoid saturation of the clathrin-dependent pathway (for EGF Lund, K. A., Opresko, L. K., Strarbuck, C., Walsh, B. J. & Wiley, H. S. (1990) J. Biol. Chem. 265, 15713-13723).

[0429] The effects of knocking down Rab5a, 5b, 5c, Eps, or Eps 15R (individually) are shown in FIG. 22 and demonstrate that disruption of single genes has little or no effect on EGF or Tfn internalization. In contrast, simultaneous knock down of Rab5a, 5b, and 5c, or Eps and Eps ISR, leads to a distinct phenotype (note: total concentration of siRNA in these experiments remained constant with that in experiments in which a single siRNA was introduced, see FIG. 23). These experiments demonstrate the effectiveness of using rationally designed siRNA to knockdown multiple genes and validates the utility of these reagents to override genetic redundancy.

### Example XIII

### Validation of Multigene Targeting Using G6PD, GAPDH, PLK, and UQC

[0430] Further demonstration of the ability to knock down expression of multiple genes using rationally designed siRNA was performed using pools of siRNA directed against four separate genes. To achieve this, siRNA were transfected into cells (total siRNA concentration of 100 nM) and assayed twenty-four hours later by B-DNA. Results shown in FIG. 24 show that pools of rationally designed molecules are capable of simultaneously silencing four different genes.

### Example XIV

### Validation of Multigene Knockouts as Demonstrated by Gene Expression Profiling, a Prophetic Example

[0431] To further demonstrate the ability to concomitantly knockdown the expression of multiple gene targets, single siRNA or siRNA pools directed against a collection of genes (e.g., 4, 8, 16, or 23 different targets) are simultaneously transfected into cells and cultured for twenty-four hours. Subsequently, mRNA is harvested from treated (and untreated) cells and labeled with one of two fluorescent probes dyes (e.g., a red fluorescent probe for the treated cells, a green fluorescent probe for the control cells.). Equivalent amounts of labeled RNA from each sample is then mixed together and hybridized to sequences that have been linked to a solid support (e.g., a slide, “DNA CHIP”). Following hybridization, the slides are washed and analyzed to assess changes in the levels of target genes induced by siRNA.

### Example XV

### Identifying Hyperfunctional siRNA

Identification of Hyperfunctional Bcl-2 siRNA

[0432] The ten rationally designed Bcl2 siRNA (identified in FIG. 13, 14) were tested to identify hyperpotent reagents. To accomplish this, each of the ten Bcl-2 siRNA were individually transfected into cells at a 300 pM (0.3 nM) concentrations. Twenty-four hours later, transcript levels were assessed by B-DNA assays and compared with relevant controls. As shown in FIG. 25, while the majority of Bcl-2 siRNA failed to induce functional levels of silencing at this concentration, siRNA 1 and 8 induced >80% silencing, and siRNA 6 exhibited greater than 90% silencing at this subnanomolar concentration.

[0433] By way of prophetic examples, similar assays could be performed with any of the groups of rationally designed genes described in the Examples. Thus for instance, rationally designed siRNA sequences directed against a gene of interest could be introduced into cells at increasingly limiting concentrations to determine whether any of the duplexes are hyperfunctional.

### Example XVI

### Gene Silencing

### Prophetic Example

[0434] Below is an example of how one might transfect a cell.

[0435] Select a cell line. The selection of a cell line is usually determined by the desired application. The most important feature to RNAi is the level of expression of the gene of interest. It is highly recommended to use cell lines for which siRNA transfection conditions have been specified and validated.

[0436] Plate the cells. Approximately 24 hours prior to transfection, plate the cells at the appropriate density so that they will be approximately 70-90% confluent, or approximately 1×10⁵ cells/ml at the time of transfection. Cell densities that are too low may lead to toxicity due to excess exposure and uptake of transfection reagent-siRNA complexes. Cell densities that are too high may lead to low transfection efficiencies and little or no silencing. Incubate the cells overnight. Standard incubation conditions for mammalian cells are 37° C. in 5% CO₂. Other cell types, such as insect cells, require different temperatures and CO₂ concentrations that are readily ascertainable by persons skilled in the art. Use conditions appropriate for the cell type of interest.

[0437] siRNA re-suspension. Add 20 μl siRNA universal buffer to each siRNA to generate a final concentration of 50 μM.

[0438] siRNA-lipid complex formation. Use RNase-free solutions and tubes. Using the following table, Table XI:

TABLE XI

| | |
|---|---|
| 96-WELL | 24-WELL |

MIXTURE 1 (TRANSIT-TKO-PLASMID DILUTION MIXTURE)

| | | |
|---|---|---|
| Opti-MEM | 9.3 μl | 46.5 μl |
| TransIT-TKO (1 μg/μl) | 0.5 μl | 2.5 μl |
| MIXTURE 1 FINAL VOLUME | 10.0 μl | 50.0 μl |

MIXTURE 2 (SIRNA DILUTION MIXTURE)

| | | |
|---|---|---|
| Opti-MEM | 9.0 μl | 45.0 μl |
| siRNA (1 μM) | 1.0 μl | 5.0 μl |
| MIXTURE 2 FINAL VOLUME | 10.0 μl | 50.0 μl |

MIXTURE 3 (SIRNA-TRANSFECTION REAGENT MIXTURE)

| | | |
|---|---|---|
| Mixture 1 | 10 μl | 50 μl |
| Mixture 2 | 10 μl | 50 μl |
| MIXTURE 3 FINAL VOLUME | 20 μl | 100 μl |

Incubate 20 minutes at room temperature

MIXTURE 4 (MEDIA-SIRNA/TRANSFECTION REAGENT
MIXTURE)

| | | |
|---|---|---|
| Mixture 3 | 20 μl | 100 μl |
| Complete media | 80 μl | 400 μl |
| MIXTURE 4 FINAL VOLUME | 100 μl | 500 μl |

Incubate 48 hours at 37° C.

[0439] Transfection. Create a Mixture 1 by combining the specified amounts of OPTI-MEM serum free media and transfection reagent in a sterile polystyrene tube. Create a Mixture 2 by combining specified amounts of each siRNA with OPTI-MEM media in sterile 1 ml tubes. Create a Mixture 3 by combining specified amounts of Mixture 1 and Mixture 2. Mix gently (do not vortex) and incubate at room temperature for 20 minutes. Create a Mixture 4 by combining specified amounts of Mixture 3 to complete media. Add appropriate volume to each cell culture well. Incubate cells with transfection reagent mixture for 24-72 hours at 37° C. This incubation time is flexible. The ratio of silencing will remain consistent at any point in the time period. Assay for gene silencing using an appropriate detection method such as RT-PCR, Western blot analysis, immunohistochemistry, phenotypic analysis, mass spectrometry, fluorescence, radioactive decay, or any other method that is now known or that comes to be known to persons skilled in the art and that from reading this disclosure would useful with the present invention. The optimal window for observing a knockdown phenotype is related to the mRNA turnover of the gene of interest, although 24-72 hours is standard. Final Volume reflects amount needed in each well for the desired cell culture format. When adjusting volumes for a Stock Mix, an additional 10% should be used to accommodate variability in pipetting, etc. Duplicate or triplicate assays should be carried out when possible.

### Example XVII

### siRNAs that Target Ubiquitin Ligases

[0440] siRNAs that target nucleotide sequences for ubiquitin ligases with the NCBI accession numbers denoted below and having sequences generated in silico by the algorithms herein, are provided. In various embodiments, the siRNAs are rationally designed. In various embodiments, the siRNAs are functional or hyperfunctional. These siRNA that have been generated by the algorithms of the present invention include:

LENGTHY TABLE REFERENCED HERE
US20080071073A1-20080320-T00001
Please refer to the end of the specification for access instructions.

[0441] Thus, consistent with Example XVII, the present invention provides an siRNA that targets a nucleotide sequence for an ubiquitin ligase provided, wherein the siRNA is selected from the group consisting of SEQ. ID NOs. 438-16501.

[0442] In another embodiment, an siRNA is provided, said siRNA comprising a sense region and an antisense region, wherein said sense region and said antisense region are at least 90% complementary, said sense region and said antisense region together form a duplex region comprising 18-30 base pairs, and said sense region comprises a sequence that is at least 90% similar to a sequence selected from the group consisting of: SEQ. ID NOs 438-16501.

[0443] In another embodiment, an siRNA is provided wherein the siRNA comprises a sense region and an antisense region, wherein said sense region and said antisense region are at least 90% complementary, said sense region and said antisense region together form a duplex region comprising 18-30 base pairs, and said sense region comprises a sequence that is identical to a contiguous stretch of at least 18 bases of a sequence selected from the group consisting of: SEQ. ID NOs 438-16501.

[0444] In another embodiment, an siRNA is provided wherein the siRNA comprises a sense region and an antisense region, wherein said sense region and said antisense region are at least 90% complementary, said sense region and said antisense region together form a duplex region comprising 19-30 base pairs, and said sense region comprises a sequence that is identical to a contiguous stretch of at least 18 bases of a sequence selected from the group consisting of: SEQ. ID NOs 438-16501.

[0445] In another embodiment, a pool of at least two siRNAs is provided, wherein said pool comprises a first siRNA and a second siRNA, said first siRNA comprises a duplex region of length 18-30 base pairs that has a first sense region that is at least 90% similar to 18 bases of a first sequence selected from the group consisting of: SEQ. ID NOs 438-16501 and said second siRNA comprises a duplex region of length 18-30 base pairs that has a second sense region that is at least 90% similar to 18 bases of a second sequence selected from the group consisting of: SEQ. ID NOs 438-16501 and wherein said first sense region and said second sense region are not identical.

[0446] In another embodiment, a pool of at least two siRNAs is provided, wherein said pool comprises a first siRNA and a second siRNA, said first siRNA comprises a duplex region of length 18-30 base pairs that has a first sense region that is identical to at least 18 bases of a sequence selected from the group consisting of: SEQ. ID NOs 438-16501 and wherein the second siRNA comprises a second sense region that comprises a sequence that is identical to at least 18 bases of a sequence selected from the group consisting of: SEQ. ID NOs 438-16501.

[0447] In another embodiment, a pool of at least two siRNAs is provided, wherein said pool comprises a first siRNA and a second siRNA, said first siRNA comprises a duplex region of length 19-30 base pairs and has a first sense region comprising a sequence that is at least 90% similar to a sequence selected from the group consisting of: SEQ. ID NOs 438-16501, and said duplex of said second siRNA is 19-30 base pairs and comprises a second sense region that comprises a sequence that is at least 90% similar to a sequence selected from the group consisting of: SEQ. ID NOs 438-16501.

[0448] In another embodiment, a pool of at least two siRNAs is provided, wherein said pool comprises a first siRNA and a second siRNA, said first siRNA comprises a duplex region of length 19-30 base pairs and has a first sense region comprising a sequence that is identical to at least 18 bases of a sequence selected the group consisting of: SEQ. ID NOs 438-16501 and said duplex of said second siRNA is 19-30 base pairs and comprises a second sense region comprising a sequence that is identical to a sequence selected from the group consisting of: SEQ. ID NOs 438-16501.

[0449] In each of the aforementioned embodiments, preferably the antisense region is at least 90% complementary to a contiguous stretch of bases of one of the NCBI sequences identified in Example XVII; each of the recited NCBI sequences is incorporated by reference as if set forth fully herein. In some embodiments, the antisense region is 100% complementary to a contiguous stretch of bases of one of the NCBI sequences identified in Example XVII.

[0450] Further, in some embodiments that are directed to siRNA duplexes in which the antisense region is 20-30 bases in length, preferably there is a stretch of 19 bases that is at least 90%, more preferably 100% complementary to the recited sequence id number and the entire antisense region is at least 90% and more preferably 100% complementary to a contiguous stretch of bases of one of the NCBI sequences identified in Example XVII.

[0451] While the invention has been described in connection with specific embodiments thereof, it will be understood that it is capable of further modifications and this application is intended to cover any variations, uses, or adaptations of the invention following, in general, the principles of the invention and including such departure from the present disclosure as come within known or customary practice within the art to which the invention pertains and as may be applied to the essential features hereinbefore set forth and as follows in the scope of the appended claims.

LENGTHY TABLE
The patent application contains a lengthy table section. A copy of the table is available in electronic form from the USPTO web site (http://seqdata.uspto.gov/?pageRequest=docDetail&DocID=US20080071073A1). An electronic copy of the table will also be available from the USPTO upon request and payment of the fee set forth in 37 CFR 1.19(b)(3).

The application's sequence listing, which the Patent Office published only in electronic form, follows.

SEQUENCE LISTING (16501 sequences)

SEQ ID NO: 1 - RNA, 19 nt, Artificial Sequence
  Synthetic
  misc_feature 1-2, 4, 6-9, 12, 15-18: n is any nucleotide
nnanannnnucnaannnna

SEQ ID NO: 2 - RNA, 19 nt, Artificial Sequence
  Synthetic
  misc_feature 1-2, 4, 6-9, 12, 15-18: n is any nucleotide
nnanannnnugnaannnna

SEQ ID NO: 3 - RNA, 19 nt, Artificial Sequence
  Synthetic
  misc_feature 1-2, 4, 6-9, 12, 15-18: n is any nucleotide
nnanannnnuunaannnna

SEQ ID NO: 4 - RNA, 19 nt, Artificial Sequence
  Synthetic
  misc_feature 1-2, 4, 6-9, 12, 15-18: n is any nucleotide
nnanannnnucncannnna

SEQ ID NO: 5 - RNA, 19 nt, Artificial Sequence
  Synthetic
  misc_feature 1-2, 4, 6-9, 12, 15-18: n is any nucleotide
nnanannnnugncannnna

SEQ ID NO: 6 - RNA, 19 nt, Artificial Sequence
  Synthetic
  misc_feature 1-2, 4, 6-9, 12, 15-18: n is any nucleotide
nnanannnnuuncannnna

SEQ ID NO: 7 - RNA, 19 nt, Artificial Sequence
  Synthetic
  misc_feature 1-2, 4, 6-9, 12, 15-18: n is any nucleotide
nnanannnnucnuannnna

SEQ ID NO: 8 - RNA, 19 nt, Artificial Sequence
  Synthetic
  misc_feature 1-2, 4, 6-9, 12, 15-18: n is any nucleotide
nnanannnnugnuannnna

SEQ ID NO: 9 - RNA, 19 nt, Artificial Sequence
  Synthetic
  misc_feature 1-2, 4, 6-9, 12, 15-18: n is any nucleotide
nnanannnnuunuannnna

SEQ ID NO: 10 - RNA, 19 nt, Artificial Sequence
  Synthetic
  misc_feature 1-2, 4, 6-9, 12, 15-18: n is any nucleotide
nnancnnnnucnaannnna

SEQ ID NO: 11 - RNA, 19 nt, Artificial Sequence
  Synthetic
  misc_feature 1-2, 4, 6-9, 12, 15-18: n is any nucleotide
nnancnnnnugnaannnna

SEQ ID NO: 12 - RNA, 19 nt, Artificial Sequence
  Synthetic
  misc_feature 1-2, 4, 6-9, 12, 15-18: n is any nucleotide
nnancnnnnuunaannnna

SEQ ID NO: 13 - RNA, 19 nt, Artificial Sequence
  Synthetic
  misc_feature 1-2, 4, 6-9, 12, 15-18: n is any nucleotide
nnancnnnnucncannnna

SEQ ID NO: 14 - RNA, 19 nt, Artificial Sequence
  Synthetic
  misc_feature 1-2, 4, 6-9, 12, 15-18: n is any nucleotide
nnancnnnnugncannnna

SEQ ID NO: 15 - RNA, 19 nt, Artificial Sequence
  Synthetic
  misc_feature 1-2, 4, 6-9, 12, 15-18: n is any nucleotide
nnancnnnnuuncannnna

SEQ ID NO: 16 - RNA, 19 nt, Artificial Sequence
  Synthetic
  misc_feature 1-2, 4, 6-9, 12, 15-18: n is any nucleotide
nnancnnnnucnuannnna

SEQ ID NO: 17 - RNA, 19 nt, Artificial Sequence
  Synthetic
  misc_feature 1-2, 4, 6-9, 12, 15-18: n is any nucleotide
nnancnnnnugnuannnna

SEQ ID NO: 18 - RNA, 19 nt, Artificial Sequence
  Synthetic
  misc_feature 1-2, 4, 6-9, 12, 15-18: n is any nucleotide
nnancnnnnuunuannnna

SEQ ID NO: 19 - RNA, 19 nt, Artificial Sequence
  Synthetic
  misc_feature 1-2, 4, 6-9, 12, 15-18: n is any nucleotide
nnangnnnnucnaannnna

SEQ ID NO: 20 - RNA, 19 nt, Artificial Sequence
  Synthetic
  misc_feature 1-2, 4, 6-9, 12, 15-18: n is any nucleotide
nnangnnnnugnaannnna

SEQ ID NO: 21 - RNA, 19 nt, Artificial Sequence
  Synthetic
  misc_feature 1-2, 4, 6-9, 12, 15-18: n is any nucleotide
nnangnnnnuunaannnna

SEQ ID NO: 22 - RNA, 19 nt, Artificial Sequence
  Synthetic
  misc_feature 1-2, 4, 6-9, 12, 15-18: n is any nucleotide
nnangnnnnucncannnna

SEQ ID NO: 23 - RNA, 19 nt, Artificial Sequence
  Synthetic
  misc_feature 1-2, 4, 6-9, 12, 15-18: n is any nucleotide
nnangnnnnugncannnna

SEQ ID NO: 24 - RNA, 19 nt, Artificial Sequence
  Synthetic
  misc_feature 1-2, 4, 6-9, 12, 15-18: n is any nucleotide
nnangnnnnuuncannnna

SEQ ID NO: 25 - RNA, 19 nt, Artificial Sequence
  Synthetic
  misc_feature 1-2, 4, 6-9, 12, 15-18: n is any nucleotide
nnangnnnnucnuannnna

SEQ ID NO: 26 - RNA, 19 nt, Artificial Sequence
  Synthetic
  misc_feature 1-2, 4, 6-9, 12, 15-18: n is any nucleotide
nnangnnnnugnuannnna

SEQ ID NO: 27 - RNA, 19 nt, Artificial Sequence
  Synthetic
  misc_feature 1-2, 4, 6-9, 12, 15-18: n is any nucleotide
nnangnnnnuunuannnna

SEQ ID NO: 28 - RNA, 22 nt, Artificial Sequence
  Synthetic
  misc_feature 4-5,7,9-12,15,18-21: n is any nucleotide
gucnnanannnnucnaannnna

SEQ ID NO: 29 - DNA, 208 bp, Homo sapiens
  misc_feature (1)...(208): human cyclophilin fragment
gttccaaaaacagtggataattttgtggccttagctacaggagagaaaggatttggctacaaaaacagcaaattccatcgtgtaatcaaggacttcatgatccagggcggagacttcaccaggggagatggcacaggaggaaagagcatctacggtgagcgcttccccgatgagaacttcaaactgaagcactacgggcctggctggg

SEQ ID NO: 30 - DNA, 200 bp, Photinus pyralis
  misc_feature (1)...(200): firefly luciferase fragment
tgaacttcccgccgccgttgttgttttggagcacggaaagacgatgacggaaaaagagatcgtggattacgtcgccagtcaagtaacaaccgcgaaaaagttgcgcggaggagttgtgtttgtggacgaagtaccgaaaggtcttaccggaaaactcgacgcaagaaaaatcagagagatcctcataaaggccaagaagg

SEQ ID NO: 31 - DNA, 108 bp, Homo sapiens
  misc_feature (1)...(108): human DBL fragment
acgggcaaggccaagtgggatgcctggaatgagctgaaagggacttccaaggaagatgccatgaaagcttacatcaacaaagtagaagagctaaagaaaaaatacggg

SEQ ID NO: 32 - RNA, 19 nt, Artificial Sequence
  Synthetic
guuccaaaaacaguggaua

SEQ ID NO: 33 - RNA, 19 nt, Artificial Sequence
  Synthetic
cccaaaaacaguggauaau

SEQ ID NO: 34 - RNA, 19 nt, Artificial Sequence
  Synthetic
caaaaacaguggauaauuu

SEQ ID NO: 35 - RNA, 19 nt, Artificial Sequence
  Synthetic
aaaacaguggauaauuuug

SEQ ID NO: 36 - RNA, 19 nt, Artificial Sequence
  Synthetic
aacaguggauaauuuugug

SEQ ID NO: 37 - RNA, 19 nt, Artificial Sequence
  Synthetic
caguggauaauuuuguggc

SEQ ID NO: 38 - RNA, 19 nt, Artificial Sequence
  Synthetic
guggauaauuuuguggccu

SEQ ID NO: 39 - RNA, 19 nt, Artificial Sequence
  Synthetic
ggauaauuuuguggccuua

SEQ ID NO: 40 - RNA, 19 nt, Artificial Sequence
  Synthetic
auaauuuuguggccuuagc

SEQ ID NO: 41 - RNA, 19 nt, Artificial Sequence
  Synthetic
aauuuuguggccuuagcua

SEQ ID NO: 42 - RNA, 19 nt, Artificial Sequence
  Synthetic
uuuuguggccuuagcuaca

SEQ ID NO: 43 - RNA, 19 nt, Artificial Sequence
  Synthetic
uuguggccuuagcuacagg

SEQ ID NO: 44 - RNA, 19 nt, Artificial Sequence
  Synthetic
guggccuuagcuacaggag

SEQ ID NO: 45 - RNA, 19 nt, Artificial Sequence
  Synthetic
ggccuuagcuacaggagag

SEQ ID NO: 46 - RNA, 19 nt, Artificial Sequence
  Synthetic
ccuuagcuacaggagagaa

SEQ ID NO: 47 - RNA, 19 nt, Artificial Sequence
  Synthetic
uuagcuacaggagagaaag

SEQ ID NO: 48 - RNA, 19 nt, Artificial Sequence
  Synthetic
agcuacaggagagaaagga

SEQ ID NO: 49 - RNA, 19 nt, Artificial Sequence
  Synthetic
cuacaggagagaaaggauu

SEQ ID NO: 50 - RNA, 19 nt, Artificial Sequence
  Synthetic
acaggagagaaaggauuug

SEQ ID NO: 51 - RNA, 19 nt, Artificial Sequence
  Synthetic
aggagagaaaggauuuggc

SEQ ID NO: 52 - RNA, 19 nt, Artificial Sequence
  Synthetic
gagagaaaggauuuggcua

SEQ ID NO: 53 - RNA, 19 nt, Artificial Sequence
  Synthetic
gagaaaggauuuggcuaca

SEQ ID NO: 54 - RNA, 19 nt, Artificial Sequence
  Synthetic
gaaaggauuuggcuacaaa

SEQ ID NO: 55 - RNA, 19 nt, Artificial Sequence
  Synthetic
aaggauuuggcuacaaaaa

SEQ ID NO: 56 - RNA, 19 nt, Artificial Sequence
  Synthetic
ggauuuggcuacaaaaaca

SEQ ID NO: 57 - RNA, 19 nt, Artificial Sequence
  Synthetic
auuuggcuacaaaaacagc

SEQ ID NO: 58 - RNA, 19 nt, Artificial Sequence
  Synthetic
uuggcuacaaaaacagcaa

SEQ ID NO: 59 - RNA, 19 nt, Artificial Sequence
  Synthetic
ggcuacaaaaacagcaaau

SEQ ID NO: 60 - RNA, 19 nt, Artificial Sequence
  Synthetic
cuacaaaaacagcaaauuc

SEQ ID NO: 61 - RNA, 19 nt, Artificial Sequence
  Synthetic
acaaaaacagcaaauucca

SEQ ID NO: 62 - RNA, 19 nt, Artificial Sequence
  Synthetic
aaaaacagcaaauuccauc

SEQ ID NO: 63 - RNA, 19 nt, Artificial Sequence
  Synthetic
aaacagcaaauuccaucgu

SEQ ID NO: 64 - RNA, 19 nt, Artificial Sequence
  Synthetic
acagcaaauuccaucgugu

SEQ ID NO: 65 - RNA, 19 nt, Artificial Sequence
  Synthetic
agcaaauuccaucguguaa

SEQ ID NO: 66 - RNA, 19 nt, Artificial Sequence
  Synthetic
caaauuccaucguguaauc

SEQ ID NO: 67 - RNA, 19 nt, Artificial Sequence
  Synthetic
aauuccaucguguaaucaa

SEQ ID NO: 68 - RNA, 19 nt, Artificial Sequence
  Synthetic
uuccaucguguaaucaagg

SEQ ID NO: 69 - RNA, 19 nt, Artificial Sequence
  Synthetic
ccaucguguaaucaaggac

SEQ ID NO: 70 - RNA, 19 nt, Artificial Sequence
  Synthetic
aucguguaaucaaggacuu

SEQ ID NO: 71 - RNA, 19 nt, Artificial Sequence
  Synthetic
cguguaaucaaggacuuca

SEQ ID NO: 72 - RNA, 19 nt, Artificial Sequence
  Synthetic
uguaaucaaggacuucaug

SEQ ID NO: 73 - RNA, 19 nt, Artificial Sequence
  Synthetic
uaaucaaggacuucaugau

SEQ ID NO: 74 - RNA, 19 nt, Artificial Sequence
  Synthetic
aucaaggacuucaugaucc

SEQ ID NO: 75 - RNA, 19 nt, Artificial Sequence
  Synthetic
caaggacuucaugauccag

SEQ ID NO: 76 - RNA, 19 nt, Artificial Sequence
  Synthetic
aggacuucaugauccaggg

SEQ ID NO: 77 - RNA, 19 nt, Artificial Sequence
  Synthetic
gacuucaugauccagggcg

SEQ ID NO: 78 - RNA, 19 nt, Artificial Sequence
  Synthetic
cuucaugauccagggcgga

SEQ ID NO: 79 - RNA, 19 nt, Artificial Sequence
  Synthetic
ucaugauccagggcggaga

SEQ ID NO: 80 - RNA, 19 nt, Artificial Sequence
  Synthetic
augauccagggcggagacu

SEQ ID NO: 81 - RNA, 19 nt, Artificial Sequence
  Synthetic
gauccagggcggagacuuc

SEQ ID NO: 82 - RNA, 19 nt, Artificial Sequence
  Synthetic
uccagggcggagacuucac

SEQ ID NO: 83 - RNA, 19 nt, Artificial Sequence
  Synthetic
cagggcggagacuucacca

SEQ ID NO: 84 - RNA, 19 nt, Artificial Sequence
  Synthetic
gggcggagacuucaccagg

SEQ ID NO: 85 - RNA, 19 nt, Artificial Sequence
  Synthetic
gcggagacuucaccagggg

SEQ ID NO: 86 - RNA, 19 nt, Artificial Sequence
  Synthetic
ggagacuucaccaggggag

SEQ ID NO: 87 - RNA, 19 nt, Artificial Sequence
  Synthetic
agacuucaccaggggagau

SEQ ID NO: 88 - RNA, 19 nt, Artificial Sequence
  Synthetic
acuucaccaggggagaugg

SEQ ID NO: 89 - RNA, 19 nt, Artificial Sequence
  Synthetic
uucaccaggggagauggca

SEQ ID NO: 90 - RNA, 19 nt, Artificial Sequence
  Synthetic
caccaggggagauggcaca

SEQ ID NO: 91 - RNA, 19 nt, Artificial Sequence
  Synthetic
ccaggggagauggcacagg

SEQ ID NO: 92 - RNA, 19 nt, Artificial Sequence
  Synthetic
aggggagauggcacaggag

SEQ ID NO: 93 - RNA, 19 nt, Artificial Sequence
  Synthetic
gggagauggcacaggagga

SEQ ID NO: 94 - RNA, 19 nt, Artificial Sequence
  Synthetic
gagauggcacaggaggaaa

SEQ ID NO: 95 - RNA, 19 nt, Artificial Sequence
  Synthetic
gauggcacaggaggaaaga

SEQ ID NO: 96 - RNA, 19 nt, Artificial Sequence
  Synthetic
uggcacaggaggaaagagc

SEQ ID NO: 97 - RNA, 19 nt, Artificial Sequence
  Synthetic
gcacaggaggaaagagcau

SEQ ID NO: 98 - RNA, 19 nt, Artificial Sequence
  Synthetic
acaggaggaaagagcaucu

SEQ ID NO: 99 - RNA, 19 nt, Artificial Sequence
  Synthetic
aggaggaaagagcaucuac

SEQ ID NO: 100 - RNA, 19 nt, Artificial Sequence
  Synthetic
gaggaaagagcaucuacgg

SEQ ID NO: 101 - RNA, 19 nt, Artificial Sequence
  Synthetic
ggaaagagcaucuacggug

SEQ ID NO: 102 - RNA, 19 nt, Artificial Sequence
  Synthetic
aaagagcaucuacggugag

SEQ ID NO: 103 - RNA, 19 nt, Artificial Sequence
  Synthetic
agagcaucuacggugagcg

SEQ ID NO: 104 - RNA, 19 nt, Artificial Sequence
  Synthetic
agcaucuacggugagcgcu

SEQ ID NO: 105 - RNA, 19 nt, Artificial Sequence
  Synthetic
caucuacggugagcgcuuc

SEQ ID NO: 106 - RNA, 19 nt, Artificial Sequence
  Synthetic
ucuacggugagcgcuuccc

SEQ ID NO: 107 - RNA, 19 nt, Artificial Sequence
  Synthetic
uacggugagcgcuuccccg

SEQ ID NO: 108 - RNA, 19 nt, Artificial Sequence
  Synthetic
cggugagcgcuuccccgau

SEQ ID NO: 109 - RNA, 19 nt, Artificial Sequence
  Synthetic
gugagcgcuuccccgauga

SEQ ID NO: 110 - RNA, 19 nt, Artificial Sequence
  Synthetic
gagcgcuuccccgaugaga

SEQ ID NO: 111 - RNA, 19 nt, Artificial Sequence
  Synthetic
gcgcuuccccgaugagaac

SEQ ID NO: 112 - RNA, 19 nt, Artificial Sequence
  Synthetic
gcuuccccgaugagaacuu

SEQ ID NO: 113 - RNA, 19 nt, Artificial Sequence
  Synthetic
uuccccgaugagaacuuca

SEQ ID NO: 114 - RNA, 19 nt, Artificial Sequence
  Synthetic
ccccgaugagaacuucaaa

SEQ ID NO: 115 - RNA, 19 nt, Artificial Sequence
  Synthetic
ccgaugagaacuucaaacu

SEQ ID NO: 116 - RNA, 19 nt, Artificial Sequence
  Synthetic
gaugagaacuucaaacuga

SEQ ID NO: 117 - RNA, 19 nt, Artificial Sequence
  Synthetic
ugagaacuucaaacugaag

SEQ ID NO: 118 - RNA, 19 nt, Artificial Sequence
  Synthetic
agaacuucaaacugaagca

SEQ ID NO: 119 - RNA, 19 nt, Artificial Sequence
  Synthetic
aacuucaaacugaagcacu

SEQ ID NO: 120 - RNA, 19 nt, Artificial Sequence
  Synthetic
cuucaaacugaagcacuac

SEQ ID NO: 121 - RNA, 19 nt, Artificial Sequence
  Synthetic
ucaaacugaagcacuacgg

SEQ ID NO: 122 - RNA, 19 nt, Artificial Sequence
  Synthetic
acgggcaaggccaaguggg

SEQ ID NO: 123 - RNA, 19 nt, Artificial Sequence
  Synthetic
cgggcaaggccaaguggga

SEQ ID NO: 124 - RNA, 19 nt, Artificial Sequence
  Synthetic
gggcaaggccaagugggau

SEQ ID NO: 125 - RNA, 19 nt, Artificial Sequence
  Synthetic
ggcaaggccaagugggaug

SEQ ID NO: 126 - RNA, 19 nt, Artificial Sequence
  Synthetic
gcaaggccaagugggaugc

SEQ ID NO: 127 - RNA, 19 nt, Artificial Sequence
  Synthetic
caaggccaagugggaugcc

SEQ ID NO: 128 - RNA, 19 nt, Artificial Sequence
  Synthetic
aaggccaagugggaugccu

SEQ ID NO: 129 - RNA, 19 nt, Artificial Sequence
  Synthetic
aggccaagugggaugccug

SEQ ID NO: 130 - RNA, 19 nt, Artificial Sequence
  Synthetic
ggccaagugggaugccugg

SEQ ID NO: 131 - RNA, 19 nt, Artificial Sequence
  Synthetic
gccaagugggaugccugga

SEQ ID NO: 132 - RNA, 19 nt, Artificial Sequence
  Synthetic
ccaagugggaugccuggaa

SEQ ID NO: 133 - RNA, 19 nt, Artificial Sequence
  Synthetic
caagugggaugccuggaau

SEQ ID NO: 134 - RNA, 19 nt, Artificial Sequence
  Synthetic
aagugggaugccuggaaug

SEQ ID NO: 135 - RNA, 19 nt, Artificial Sequence
  Synthetic
agugggaugccuggaauga

SEQ ID NO: 136 - RNA, 19 nt, Artificial Sequence
  Synthetic
gugggaugccuggaaugag

SEQ ID NO: 137 - RNA, 19 nt, Artificial Sequence
  Synthetic
ugggaugccuggaaugagc

SEQ ID NO: 138 - RNA, 19 nt, Artificial Sequence
  Synthetic
gggaugccuggaaugagcu

SEQ ID NO: 139 - RNA, 19 nt, Artificial Sequence
  Synthetic
ggaugccuggaaugagcug

SEQ ID NO: 140 - RNA, 19 nt, Artificial Sequence
  Synthetic
gaugccuggaaugagcuga

SEQ ID NO: 141 - RNA, 19 nt, Artificial Sequence
  Synthetic
augccuggaaugagcugaa

SEQ ID NO: 142 - RNA, 19 nt, Artificial Sequence
  Synthetic
ugccuggaaugagcugaaa

SEQ ID NO: 143 - RNA, 19 nt, Artificial Sequence
  Synthetic
gccuggaaugagcugaaag

SEQ ID NO: 144 - RNA, 19 nt, Artificial Sequence
  Synthetic
ccuggaaugagcugaaagg

SEQ ID NO: 145 - RNA, 19 nt, Artificial Sequence
  Synthetic
cuggaaugagcugaaaggg

SEQ ID NO: 146 - RNA, 19 nt, Artificial Sequence
  Synthetic
uggaaugagcugaaaggga

SEQ ID NO: 147 - RNA, 19 nt, Artificial Sequence
  Synthetic
ggaaugagcugaaagggac

SEQ ID NO: 148 - RNA, 19 nt, Artificial Sequence
  Synthetic
gaaugagcugaaagggacu

SEQ ID NO: 149 - RNA, 19 nt, Artificial Sequence
  Synthetic
aaugagcugaaagggacuu

SEQ ID NO: 150 - RNA, 19 nt, Artificial Sequence
  Synthetic
augagcugaaagggacuuc

SEQ ID NO: 151 - RNA, 19 nt, Artificial Sequence
  Synthetic
ugagcugaaagggacuucc

SEQ ID NO: 152 - RNA, 19 nt, Artificial Sequence
  Synthetic
gagcugaaagggacuucca

SEQ ID NO: 153 - RNA, 19 nt, Artificial Sequence
  Synthetic
agcugaaagggacuuccaa

SEQ ID NO: 154 - RNA, 19 nt, Artificial Sequence
  Synthetic
gcugaaagggacuuccaag

SEQ ID NO: 155 - RNA, 19 nt, Artificial Sequence
  Synthetic
cugaaagggacuuccaagg

SEQ ID NO: 156 - RNA, 19 nt, Artificial Sequence
  Synthetic
ugaaagggacuuccaagga

SEQ ID NO: 157 - RNA, 19 nt, Artificial Sequence
  Synthetic
gaaagggacuuccaaggaa

SEQ ID NO: 158 - RNA, 19 nt, Artificial Sequence
  Synthetic
aaagggacuuccaaggaag

SEQ ID NO: 159 - RNA, 19 nt, Artificial Sequence
  Synthetic
aagggacuuccaaggaaga

SEQ ID NO: 160 - RNA, 19 nt, Artificial Sequence
  Synthetic
agggacuuccaaggaagau

SEQ ID NO: 161 - RNA, 19 nt, Artificial Sequence
  Synthetic
gggacuuccaaggaagaug

SEQ ID NO: 162 - RNA, 19 nt, Artificial Sequence
  Synthetic
ggacuuccaaggaagaugc

SEQ ID NO: 163 - RNA, 19 nt, Artificial Sequence
  Synthetic
gacuuccaaggaagaugcc

SEQ ID NO: 164 - RNA, 19 nt, Artificial Sequence
  Synthetic
acuuccaaggaagaugcca

SEQ ID NO: 165 - RNA, 19 nt, Artificial Sequence
  Synthetic
cuuccaaggaagaugccau

SEQ ID NO: 166 - RNA, 19 nt, Artificial Sequence
  Synthetic
uuccaaggaagaugccaug

SEQ ID NO: 167 - RNA, 19 nt, Artificial Sequence
  Synthetic
uccaaggaagaugccauga

SEQ ID NO: 168 - RNA, 19 nt, Artificial Sequence
  Synthetic
ccaaggaagaugccaugaa

SEQ ID NO: 169 - RNA, 19 nt, Artificial Sequence
  Synthetic
caaggaagaugccaugaaa

SEQ ID NO: 170 - RNA, 19 nt, Artificial Sequence
  Synthetic
aaggaagaugccaugaaag

SEQ ID NO: 171 - RNA, 19 nt, Artificial Sequence
  Synthetic
aggaagaugccaugaaagc

SEQ ID NO: 172 - RNA, 19 nt, Artificial Sequence
  Synthetic
ggaagaugccaugaaagcu

SEQ ID NO: 173 - RNA, 19 nt, Artificial Sequence
  Synthetic
gaagaugccaugaaagcuu

SEQ ID NO: 174 - RNA, 19 nt, Artificial Sequence
  Synthetic
aagaugccaugaaagcuua

SEQ ID NO: 175 - RNA, 19 nt, Artificial Sequence
  Synthetic
agaugccaugaaagcuuac

SEQ ID NO: 176 - RNA, 19 nt, Artificial Sequence
  Synthetic
gaugccaugaaagcuuaca

SEQ ID NO: 177 - RNA, 19 nt, Artificial Sequence
  Synthetic
augccaugaaagcuuacau

SEQ ID NO: 178 - RNA, 19 nt, Artificial Sequence
  Synthetic
ugccaugaaagcuuacauc

SEQ ID NO: 179 - RNA, 19 nt, Artificial Sequence
  Synthetic
gccaugaaagcuuacauca

SEQ ID NO: 180 - RNA, 19 nt, Artificial Sequence
  Synthetic
ccaugaaagcuuacaucaa

SEQ ID NO: 181 - RNA, 19 nt, Artificial Sequence
  Synthetic
caugaaagcuuacaucaac

SEQ ID NO: 182 - RNA, 19 nt, Artificial Sequence
  Synthetic
augaaagcuuacaucaaca

SEQ ID NO: 183 - RNA, 19 nt, Artificial Sequence
  Synthetic
ugaaagcuuacaucaacaa

SEQ ID NO: 184 - RNA, 19 nt, Artificial Sequence
  Synthetic
gaaagcuuacaucaacaaa

SEQ ID NO: 185 - RNA, 19 nt, Artificial Sequence
  Synthetic
aaagcuuacaucaacaaag

SEQ ID NO: 186 - RNA, 19 nt, Artificial Sequence
  Synthetic
aagcuuacaucaacaaagu

SEQ ID NO: 187 - RNA, 19 nt, Artificial Sequence
  Synthetic
agcuuacaucaacaaagua

SEQ ID NO: 188 - RNA, 19 nt, Artificial Sequence
  Synthetic
agcuuacaucacaaaguag

SEQ ID NO: 189 - RNA, 19 nt, Artificial Sequence
  Synthetic
cuuacaucaacaaaguaga

SEQ ID NO: 190 - RNA, 19 nt, Artificial Sequence
  Synthetic
uuacaucaacaaaguagaa

SEQ ID NO: 191 - RNA, 19 nt, Artificial Sequence
  Synthetic
uacaucaacaaaguagaag

SEQ ID NO: 192 - RNA, 19 nt, Artificial Sequence
  Synthetic
acaucaacaaaguagaaga

SEQ ID NO: 193 - RNA, 19 nt, Artificial Sequence
  Synthetic
caucaacaaaguagaagag

SEQ ID NO: 194 - RNA, 19 nt, Artificial Sequence
  Synthetic
aucaacaaaguagaagagc

SEQ ID NO: 195 - RNA, 19 nt, Artificial Sequence
  Synthetic
ucaacaaaguagaagagcu

SEQ ID NO: 196 - RNA, 19 nt, Artificial Sequence
  Synthetic
caacaaaguagaagagcua

SEQ ID NO: 197 - RNA, 19 nt, Artificial Sequence
  Synthetic
aacaaaguagaagagcuaa

SEQ ID NO: 198 - RNA, 19 nt, Artificial Sequence
  Synthetic
acaaaguagaagagcuaaa

SEQ ID NO: 199 - RNA, 19 nt, Artificial Sequence
  Synthetic
caaaguagaagagcuaaag

SEQ ID NO: 200 - RNA, 19 nt, Artificial Sequence
  Synthetic
aaaguagaagagcuaaaga

SEQ ID NO: 201 - RNA, 19 nt, Artificial Sequence
  Synthetic
aaguagaagagcuaaagaa

SEQ ID NO: 202 - RNA, 19 nt, Artificial Sequence
  Synthetic
aguagaagagcuaaagaaa

SEQ ID NO: 203 - RNA, 19 nt, Artificial Sequence
  Synthetic
guagaagagcuaaagaaaa

SEQ ID NO: 204 - RNA, 19 nt, Artificial Sequence
  Synthetic
uagaagagcuaaagaaaaa

SEQ ID NO: 205 - RNA, 19 nt, Artificial Sequence
  Synthetic
agaagagcuaaagaaaaaa

SEQ ID NO: 206 - RNA, 19 nt, Artificial Sequence
  Synthetic
gaagagcuaaagaaaaaau

SEQ ID NO: 207 - RNA, 19 nt, Artificial Sequence
  Synthetic
aagagcuaaagaaaaaaua

SEQ ID NO: 208 - RNA, 19 nt, Artificial Sequence
  Synthetic
agagcuaaagaaaaaauac

SEQ ID NO: 209 - RNA, 19 nt, Artificial Sequence
  Synthetic
gagcuaaagaaaaaauacg

SEQ ID NO: 210 - RNA, 19 nt, Artificial Sequence
  Synthetic
agcuaaagaaaaaauacgg

SEQ ID NO: 211 - RNA, 19 nt, Artificial Sequence
  Synthetic
gcuaaagaaaaaauacggg

SEQ ID NO: 212 - RNA, 19 nt, Artificial Sequence
  Synthetic
auccucauaaaggccaaga

SEQ ID NO: 213 - RNA, 19 nt, Artificial Sequence
  Synthetic
agauccucauaaaggccaa

SEQ ID NO: 214 - RNA, 19 nt, Artificial Sequence
  Synthetic
agagauccucauaaaggcc

SEQ ID NO: 215 - RNA, 19 nt, Artificial Sequence
  Synthetic
agagagauccucauaaagg

SEQ ID NO: 216 - RNA, 19 nt, Artificial Sequence
  Synthetic
ucagagagauccucauaaa

SEQ ID NO: 217 - RNA, 19 nt, Artificial Sequence
  Synthetic
aaucagagagauccucaua

SEQ ID NO: 218 - RNA, 19 nt, Artificial Sequence
  Synthetic
aaaaucagagagauccuca

SEQ ID NO: 219 - RNA, 19 nt, Artificial Sequence
  Synthetic
gaaaaaucagagagauccu

SEQ ID NO: 220 - RNA, 19 nt, Artificial Sequence
  Synthetic
aagaaaaaucagagagauc

SEQ ID NO: 221 - RNA, 19 nt, Artificial Sequence
  Synthetic
gcaagaaaaaucagagaga

SEQ ID NO: 222 - RNA, 19 nt, Artificial Sequence
  Synthetic
acgcaagaaaaaucagaga

SEQ ID NO: 223 - RNA, 19 nt, Artificial Sequence
  Synthetic
cgacgcaagaaaaaucaga

SEQ ID NO: 224 - RNA, 19 nt, Artificial Sequence
  Synthetic
cucgacgcaagaaaaauca

SEQ ID NO: 225 - RNA, 19 nt, Artificial Sequence
  Synthetic
aacucgacgcaagaaaaau

SEQ ID NO: 226 - RNA, 19 nt, Artificial Sequence
  Synthetic
aaaacucgacgcaagaaaa

SEQ ID NO: 227 - RNA, 19 nt, Artificial Sequence
  Synthetic
ggaaaacucgacgcaagaa

SEQ ID NO: 228 - RNA, 19 nt, Artificial Sequence
  Synthetic
ccggaaaacucgacgcaag

SEQ ID NO: 229 - RNA, 19 nt, Artificial Sequence
  Synthetic
uaccggaaaacucgacgca

SEQ ID NO: 230 - RNA, 19 nt, Artificial Sequence
  Synthetic
cuuaccggaaaacucgacg

SEQ ID NO: 231 - RNA, 19 nt, Artificial Sequence
  Synthetic
gucuuaccggaaaacucga

SEQ ID NO: 232 - RNA, 19 nt, Artificial Sequence
  Synthetic
aggucuuaccggaaaacuc

SEQ ID NO: 233 - RNA, 19 nt, Artificial Sequence
  Synthetic
aaaggucuuaccggaaaac

SEQ ID NO: 234 - RNA, 19 nt, Artificial Sequence
  Synthetic
cgaaaggucuuaccggaaa

SEQ ID NO: 235 - RNA, 19 nt, Artificial Sequence
  Synthetic
accgaaaggucuuaccgga

SEQ ID NO: 236 - RNA, 19 nt, Artificial Sequence
  Synthetic
guaccgaaaggucuuaccg

SEQ ID NO: 237 - RNA, 19 nt, Artificial Sequence
  Synthetic
aaguaccgaaaggucuuac

SEQ ID NO: 238 - RNA, 19 nt, Artificial Sequence
  Synthetic
cgaaguaccgaaaggucuu

SEQ ID NO: 239 - RNA, 19 nt, Artificial Sequence
  Synthetic
gacgaaguaccgaaagguc

SEQ ID NO: 240 - RNA, 19 nt, Artificial Sequence
  Synthetic
uggacgaaguaccgaaagg

SEQ ID NO: 241 - RNA, 19 nt, Artificial Sequence
  Synthetic
uguggacgaaguaccgaaa

SEQ ID NO: 242 - RNA, 19 nt, Artificial Sequence
  Synthetic
uuuguggacgaaguaccga

SEQ ID NO: 243 - RNA, 19 nt, Artificial Sequence
  Synthetic
uguuuguggacgaaguacc

SEQ ID NO: 244 - RNA, 19 nt, Artificial Sequence
  Synthetic
uguguuuguggacgaagua

SEQ ID NO: 245 - RNA, 19 nt, Artificial Sequence
  Synthetic
guuguguuuguggacgaag

SEQ ID NO: 246 - RNA, 19 nt, Artificial Sequence
  Synthetic
gaguuguguuuguggacga

SEQ ID NO: 247 - RNA, 19 nt, Artificial Sequence
  Synthetic
aggaguuguguuuguggac

SEQ ID NO: 248 - RNA, 19 nt, Artificial Sequence
  Synthetic
ggaggaguuguguuugugg

SEQ ID NO: 249 - RNA, 19 nt, Artificial Sequence
  Synthetic
gcggaggaguuguguuugu

SEQ ID NO: 250 - RNA, 19 nt, Artificial Sequence
  Synthetic
gcgcggaggaguuguguuu

SEQ ID NO: 251 - RNA, 19 nt, Artificial Sequence
  Synthetic
uugcgcggaggaguugugu

SEQ ID NO: 252 - RNA, 19 nt, Artificial Sequence
  Synthetic
aguugcgcggaggaguugu

SEQ ID NO: 253 - RNA, 19 nt, Artificial Sequence
  Synthetic
aaaguugcgcggaggaguu

SEQ ID NO: 254 - RNA, 19 nt, Artificial Sequence
  Synthetic
aaaaaguugcgcggaggag

SEQ ID NO: 255 - RNA, 19 nt, Artificial Sequence
  Synthetic
cgaaaaaguugcgcggagg

SEQ ID NO: 256 - RNA, 19 nt, Artificial Sequence
  Synthetic
cgcgaaaaaguugcgcgga

SEQ ID NO: 257 - RNA, 19 nt, Artificial Sequence
  Synthetic
accgcgaaaaaguugcgcg

SEQ ID NO: 258 - RNA, 19 nt, Artificial Sequence
  Synthetic
caaccgcgaaaaaguugcg

SEQ ID NO: 259 - RNA, 19 nt, Artificial Sequence
  Synthetic
aacaaccgcgaaaaaguug

SEQ ID NO: 260 - RNA, 19 nt, Artificial Sequence
  Synthetic
guaacaaccgcgaaaaagu

SEQ ID NO: 261 - RNA, 19 nt, Artificial Sequence
  Synthetic
aaguaacaaccgcgaaaaa

SEQ ID NO: 262 - RNA, 19 nt, Artificial Sequence
  Synthetic
ucaaguaacaaccgcgaaa

SEQ ID NO: 263 - RNA, 19 nt, Artificial Sequence
  Synthetic
agucaaguaacaaccgcga

SEQ ID NO: 264 - RNA, 19 nt, Artificial Sequence
  Synthetic
ccagucaaguaacaaccgc

SEQ ID NO: 265 - RNA, 19 nt, Artificial Sequence
  Synthetic
cgccagucaaguaacaacc

SEQ ID NO: 266 - RNA, 19 nt, Artificial Sequence
  Synthetic
gucgccagucaaguaacaa

SEQ ID NO: 267 - RNA, 19 nt, Artificial Sequence
  Synthetic
acgucgccagucaaguaac

SEQ ID NO: 268 - RNA, 19 nt, Artificial Sequence
  Synthetic
uuacgucgccagucaagua

SEQ ID NO: 269 - RNA, 19 nt, Artificial Sequence
  Synthetic
gauuacgucgccagucaag

SEQ ID NO: 270 - RNA, 19 nt, Artificial Sequence
  Synthetic
uggauuacgucgccaguca

SEQ ID NO: 271 - RNA, 19 nt, Artificial Sequence
  Synthetic
cguggauuacgucgccagu

SEQ ID NO: 272 - RNA, 19 nt, Artificial Sequence
  Synthetic
aucguggauuacgucgcca

SEQ ID NO: 273 - RNA, 19 nt, Artificial Sequence
  Synthetic
agaucguggauuacgucgc

SEQ ID NO: 274 - RNA, 19 nt, Artificial Sequence
  Synthetic
agagaucguggauuacguc

SEQ ID NO: 275 - RNA, 19 nt, Artificial Sequence
  Synthetic
aaagagaucguggauuacg

SEQ ID NO: 276 - RNA, 19 nt, Artificial Sequence
  Synthetic
aaaaagagaucguggauua

SEQ ID NO: 277 - RNA, 18 nt, Artificial Sequence
  Synthetic
gaaaaagagaucguggau

SEQ ID NO: 278 - RNA, 19 nt, Artificial Sequence
  Synthetic
acggaaaaagagaucgugg

SEQ ID NO: 279 - RNA, 19 nt, Artificial Sequence
  Synthetic
ugacggaaaaagagaucgu

SEQ ID NO: 280 - RNA, 19 nt, Artificial Sequence
  Synthetic
gaugacggaaaaagagauc

SEQ ID NO: 281 - RNA, 19 nt, Artificial Sequence
  Synthetic
acgaugacggaaaaagaga

SEQ ID NO: 282 - RNA, 19 nt, Artificial Sequence
  Synthetic
agacgaugacggaaaaaga

SEQ ID NO: 283 - RNA, 19 nt, Artificial Sequence
  Synthetic
aaagacgaugacggaaaaa

SEQ ID NO: 284 - RNA, 19 nt, Artificial Sequence
  Synthetic
ggaaagacgaugacggaaa

SEQ ID NO: 285 - RNA, 19 nt, Artificial Sequence
  Synthetic
acggaaagacgaugacgga

SEQ ID NO: 286 - RNA, 19 nt, Artificial Sequence
  Synthetic
gcacggaaagacgaugacg

SEQ ID NO: 287 - RNA, 19 nt, Artificial Sequence
  Synthetic
gagcacggaaagacgauga

SEQ ID NO: 288 - RNA, 19 nt, Artificial Sequence
  Synthetic
uggagcacggaaagacgau

SEQ ID NO: 289 - RNA, 19 nt, Artificial Sequence
  Synthetic
uuuggagcacggaaagacg

SEQ ID NO: 290 - RNA, 19 nt, Artificial Sequence
  Synthetic
guuuuggagcacggaaaga

SEQ ID NO: 291 - RNA, 19 nt, Artificial Sequence
  Synthetic
uuguuuuggagcacggaaa

SEQ ID NO: 292 - RNA, 19 nt, Artificial Sequence
  Synthetic
uguuguuuuggagcacgga

SEQ ID NO: 293 - RNA, 19 nt, Artificial Sequence
  Synthetic
guuguuguuuuggagcacg

SEQ ID NO: 294 - RNA, 19 nt, Artificial Sequence
  Synthetic
ccguuguuguuuuggagca

SEQ ID NO: 295 - RNA, 19 nt, Artificial Sequence
  Synthetic
cgccguuguuguuuuggag

SEQ ID NO: 296 - RNA, 19 nt, Artificial Sequence
  Synthetic
gccgccguuguuguuuugg

SEQ ID NO: 297 - RNA, 19 nt, Artificial Sequence
  Synthetic
ccgccgccguuguuguuuu

SEQ ID NO: 298 - RNA, 19 nt, Artificial Sequence
  Synthetic
ucccgccgccguuguuguu

SEQ ID NO: 299 - RNA, 19 nt, Artificial Sequence
  Synthetic
cuucccgccgccguuguug

SEQ ID NO: 300 - RNA, 19 nt, Artificial Sequence
  Synthetic
aacuucccgccgccguugu

SEQ ID NO: 301 - RNA, 19 nt, Artificial Sequence
  Synthetic
ugaacuucccgccgccguu

SEQ ID NO: 302 - RNA, 19 nt, Artificial Sequence
  Synthetic
gggagauagugaugaagua

SEQ ID NO: 303 - RNA, 19 nt, Artificial Sequence
  Synthetic
gaaguacauccauuauaag

SEQ ID NO: 304 - RNA, 19 nt, Artificial Sequence
  Synthetic
guacgacaaccgggagaua

SEQ ID NO: 305 - RNA, 19 nt, Artificial Sequence
  Synthetic
agauagugaugaaguacau

SEQ ID NO: 306 - RNA, 19 nt, Artificial Sequence
  Synthetic
ugaagacucugcucaguuu

SEQ ID NO: 307 - RNA, 19 nt, Artificial Sequence
  Synthetic
gcaugcggccucuguuuga

SEQ ID NO: 308 - RNA, 19 nt, Artificial Sequence
  Synthetic
ugcggccucuguuugauuu

SEQ ID NO: 309 - RNA, 19 nt, Artificial Sequence
  Synthetic
gagauagugaugaaguaca

SEQ ID NO: 310 - RNA, 19 nt, Artificial Sequence
  Synthetic
ggagauagugaugaaguac

SEQ ID NO: 311 - RNA, 19 nt, Artificial Sequence
  Synthetic
gaagacucugcucaguuug

SEQ ID NO: 312 - DNA, 19 bp, Artificial Sequence
  Synthetic
gaaagaatctgtagagaaa

SEQ ID NO: 313 - DNA, 19 bp, Artificial Sequence
  Synthetic
gcaatgagctgtttgaaga

SEQ ID NO: 314 - DNA, 19 bp, Artificial Sequence
  Synthetic
tgacaaaggtggataaatt

SEQ ID NO: 315 - DNA, 19 bp, Artificial Sequence
  Synthetic
ggaaatggatctctttgaa

SEQ ID NO: 316 - DNA, 19 bp, Artificial Sequence
  Synthetic
ggaaagtaatggtccaaca

SEQ ID NO: 317 - DNA, 19 bp, Artificial Sequence
  Synthetic
agacagttatgcagctatt

SEQ ID NO: 318 - DNA, 19 bp, Artificial Sequence
  Synthetic
ccaattctcggaagcaaga

SEQ ID NO: 319 - DNA, 19 bp, Artificial Sequence
  Synthetic
gaaagtaatggtccaacag

SEQ ID NO: 320 - DNA, 19 bp, Artificial Sequence
  Synthetic
gcgccagagtgaacaagta

SEQ ID NO: 321 - DNA, 19 bp, Artificial Sequence
  Synthetic
gaaggtggcccagctatgt

SEQ ID NO: 322 - DNA, 19 bp, Artificial Sequence
  Synthetic
ggaaccagcgccagagtga

SEQ ID NO: 323 - DNA, 19 bp, Artificial Sequence
  Synthetic
gagcgagattgcaggcata

SEQ ID NO: 324 - DNA, 19 bp, Artificial Sequence
  Synthetic
gttagtatctgatgacttg

SEQ ID NO: 325 - DNA, 19 bp, Artificial Sequence
  Synthetic
gaaatggaaccactaagaa

SEQ ID NO: 326 - DNA, 19 bp, Artificial Sequence
  Synthetic
ggaaatggaaccactaaga

SEQ ID NO: 327 - DNA, 19 bp, Artificial Sequence
  Synthetic
caactacactttccaatgc

SEQ ID NO: 328 - DNA, 19 bp, Artificial Sequence
  Synthetic
ccaccaagatttcatgata

SEQ ID NO: 329 - DNA, 19 bp, Artificial Sequence
  Synthetic
gatcggaactccaacaaga

SEQ ID NO: 330 - DNA, 19 bp, Artificial Sequence
  Synthetic
aaacggagctacagattat

SEQ ID NO: 331 - DNA, 19 bp, Artificial Sequence
  Synthetic
ccacacagcattcttgtaa

SEQ ID NO: 332 - DNA, 19 bp, Artificial Sequence
  Synthetic
gaagttaccttgagcaatc

SEQ ID NO: 333 - DNA, 19 bp, Artificial Sequence
  Synthetic
ggacttggccgatccagaa

SEQ ID NO: 334 - DNA, 19 bp, Artificial Sequence
  Synthetic
gcacttggatcgagatgag

SEQ ID NO: 335 - DNA, 19 bp, Artificial Sequence
  Synthetic
caaagaccaattcgcgtta

SEQ ID NO: 336 - DNA, 19 bp, Artificial Sequence
  Synthetic
ccgaatcaatcgcatcttc

SEQ ID NO: 337 - DNA, 19 bp, Artificial Sequence
  Synthetic
gacatgatcctgcagttca

SEQ ID NO: 338 - DNA, 19 bp, Artificial Sequence
  Synthetic
gagcgaatcgtcaccactt

SEQ ID NO: 339 - DNA, 19 bp, Artificial Sequence
  Synthetic
cctccgagctggcgtctac

SEQ ID NO: 340 - DNA, 19 bp, Artificial Sequence
  Synthetic
tcacatggttaacctctaa

SEQ ID NO: 341 - DNA, 19 bp, Artificial Sequence
  Synthetic
gatgagggacgccataatc

SEQ ID NO: 342 - DNA, 19 bp, Artificial Sequence
  Synthetic
cctctaactacaaatctta

SEQ ID NO: 343 - DNA, 19 bp, Artificial Sequence
  Synthetic
ggaaggtgctatccaaaat

SEQ ID NO: 344 - DNA, 19 bp, Artificial Sequence
  Synthetic
gcaagcaagtcctaacatt

SEQ ID NO: 345 - DNA, 19 bp, Artificial Sequence
  Synthetic
ggaagaggagtagacctta

SEQ ID NO: 346 - DNA, 19 bp, Artificial Sequence
  Synthetic
aggaatcagtgttgtagta

SEQ ID NO: 347 - DNA, 19 bp, Artificial Sequence
  Synthetic
gaagaggagtagaccttac

SEQ ID NO: 348 - DNA, 19 bp, Artificial Sequence
  Synthetic
gaaagtcaagcctggtatt

SEQ ID NO: 349 - DNA, 19 bp, Artificial Sequence
  Synthetic
aaagtcaagcctggtatta

SEQ ID NO: 350 - DNA, 19 bp, Artificial Sequence
  Synthetic
gctatgaacgtgaatgatc

SEQ ID NO: 351 - DNA, 19 bp, Artificial Sequence
  Synthetic
caagcctggtattacgttt

SEQ ID NO: 352 - DNA, 19 bp, Artificial Sequence
  Synthetic
ggaacaagatctgtcaatt

SEQ ID NO: 353 - DNA, 19 bp, Artificial Sequence
  Synthetic
gcaatgaacgtgaacgaaa

SEQ ID NO: 354 - DNA, 19 bp, Artificial Sequence
  Synthetic
caatgaacgtgaacgaaat

SEQ ID NO: 355 - DNA, 19 bp, Artificial Sequence
  Synthetic
ggacaggagcggtatcaca

SEQ ID NO: 356 - DNA, 19 bp, Artificial Sequence
  Synthetic
agacagagcttgagaataa

SEQ ID NO: 357 - DNA, 19 bp, Artificial Sequence
  Synthetic
gagaagatctttatgcaaa

SEQ ID NO: 358 - DNA, 19 bp, Artificial Sequence
  Synthetic
gaagagaaatcagcagata

SEQ ID NO: 359 - DNA, 19 bp, Artificial Sequence
  Synthetic
gcaagtaactcaactaaca

SEQ ID NO: 360 - DNA, 19 bp, Artificial Sequence
  Synthetic
gagctaatctgccacattg

SEQ ID NO: 361 - DNA, 19 bp, Artificial Sequence
  Synthetic
gcagatgagttactagaaa

SEQ ID NO: 362 - DNA, 19 bp, Artificial Sequence
  Synthetic
caacttaattgtccagaaa

SEQ ID NO: 363 - DNA, 19 bp, Artificial Sequence
  Synthetic
caacacaggattctgataa

SEQ ID NO: 364 - DNA, 19 bp, Artificial Sequence
  Synthetic
agattgtgcctaagtctct

SEQ ID NO: 365 - DNA, 19 bp, Artificial Sequence
  Synthetic
atgaagatctggaggtgaa

SEQ ID NO: 366 - DNA, 19 bp, Artificial Sequence
  Synthetic
tttgagacttcttgcctaa

SEQ ID NO: 367 - DNA, 19 bp, Artificial Sequence
  Synthetic
agatcaccctccttaaata

SEQ ID NO: 368 - DNA, 19 bp, Artificial Sequence
  Synthetic
caacggatttggtcgtatt

SEQ ID NO: 369 - DNA, 19 bp, Artificial Sequence
  Synthetic
gaaatcccatcaccatctt

SEQ ID NO: 370 - DNA, 19 bp, Artificial Sequence
  Synthetic
gacctcaactacatggttt

SEQ ID NO: 371 - DNA, 19 bp, Artificial Sequence
  Synthetic
tggtttacatgttccaata

SEQ ID NO: 372 - DNA, 19 bp, Artificial Sequence
  Synthetic
gaagaaatcgatgttgttt

SEQ ID NO: 373 - DNA, 19 bp, Artificial Sequence
  Synthetic
acacaaacttgaacagcta

SEQ ID NO: 374 - DNA, 19 bp, Artificial Sequence
  Synthetic
ggaagaaatcgatgttgtt

SEQ ID NO: 375 - DNA, 19 bp, Artificial Sequence
  Synthetic
gaaacgacgagaacagttg

SEQ ID NO: 376 - DNA, 19 bp, Artificial Sequence
  Synthetic
gcacatggatggaggttct

SEQ ID NO: 377 - DNA, 19 bp, Artificial Sequence
  Synthetic
gcagagagagcagatttga

SEQ ID NO: 378 - DNA, 19 bp, Artificial Sequence
  Synthetic
gaggttctctggatcaagt

SEQ ID NO: 379 - DNA, 19 bp, Artificial Sequence
  Synthetic
gagcagatttgaagcaact

SEQ ID NO: 380 - DNA, 19 bp, Artificial Sequence
  Synthetic
caaagacgatgacttcgaa

SEQ ID NO: 381 - DNA, 19 bp, Artificial Sequence
  Synthetic
gatcagcatttgcatggaa

SEQ ID NO: 382 - DNA, 19 bp, Artificial Sequence
  Synthetic
tccaggagtttgtcaataa

SEQ ID NO: 383 - DNA, 19 bp, Artificial Sequence
  Synthetic
ggaagctgatccaccttga

SEQ ID NO: 384 - DNA, 19 bp, Artificial Sequence
  Synthetic
gcagaaatctaaggatata

SEQ ID NO: 385 - DNA, 19 bp, Artificial Sequence
  Synthetic
caacaaggatgaagtctat

SEQ ID NO: 386 - DNA, 19 bp, Artificial Sequence
  Synthetic
cagcagaaatctaaggata

SEQ ID NO: 387 - DNA, 19 bp, Artificial Sequence
  Synthetic
ctagatggctttctcagta

SEQ ID NO: 388 - DNA, 19 bp, Artificial Sequence
  Synthetic
agacaaggtcccaaagaca

SEQ ID NO: 389 - DNA, 19 bp, Artificial Sequence
  Synthetic
ggaatggcaagaccagcaa

SEQ ID NO: 390 - DNA, 19 bp, Artificial Sequence
  Synthetic
agaattattccagggttta

SEQ ID NO: 391 - DNA, 19 bp, Artificial Sequence
  Synthetic
gcagacaaggtcccaaaga

SEQ ID NO: 392 - DNA, 19 bp, Artificial Sequence
  Synthetic
agaagcagcttcaggatga

SEQ ID NO: 393 - DNA, 19 bp, Artificial Sequence
  Synthetic
gagcttgacttccagaaga

SEQ ID NO: 394 - DNA, 19 bp, Artificial Sequence
  Synthetic
ccaccgaagttcaccctaa

SEQ ID NO: 395 - DNA, 19 bp, Artificial Sequence
  Synthetic
gagaagagctcctccatca

SEQ ID NO: 396 - DNA, 19 bp, Artificial Sequence
  Synthetic
gaaagagcatctacggtga

SEQ ID NO: 397 - DNA, 19 bp, Artificial Sequence
  Synthetic
gaaaggatttggctacaaa

SEQ ID NO: 398 - DNA, 19 bp, Artificial Sequence
  Synthetic
acagcaaattccatcgtgt

SEQ ID NO: 399 - DNA, 19 bp, Artificial Sequence
  Synthetic
ggaaagactgttccaaaaa

SEQ ID NO: 400 - DNA, 19 bp, Artificial Sequence
  Synthetic
caacacgcctcatcctcta

SEQ ID NO: 401 - DNA, 19 bp, Artificial Sequence
  Synthetic
catgaaagcttacatcaac

SEQ ID NO: 402 - DNA, 19 bp, Artificial Sequence
  Synthetic
aagatgccatgaaagctta

SEQ ID NO: 403 - DNA, 19 bp, Artificial Sequence
  Synthetic
gcacataccgcctgagtct

SEQ ID NO: 404 - DNA, 19 bp, Artificial Sequence
  Synthetic
gatcaaatctgaagaagga

SEQ ID NO: 405 - DNA, 19 bp, Artificial Sequence
  Synthetic
gccaagaagtttcctaata

SEQ ID NO: 406 - DNA, 19 bp, Artificial Sequence
  Synthetic
cagcatatcttgaaccatt

SEQ ID NO: 407 - DNA, 19 bp, Artificial Sequence
  Synthetic
gaacaaaggaaacggatga

SEQ ID NO: 408 - DNA, 19 bp, Artificial Sequence
  Synthetic
cggaaacggtccaggctat

SEQ ID NO: 409 - DNA, 19 bp, Artificial Sequence
  Synthetic
gcttcgagcagacatgata

SEQ ID NO: 410 - DNA, 19 bp, Artificial Sequence
  Synthetic
cctacacggtcctcctata

SEQ ID NO: 411 - DNA, 19 bp, Artificial Sequence
  Synthetic
gccaagaacctcatcatct

SEQ ID NO: 412 - DNA, 19 bp, Artificial Sequence
  Synthetic
gatatgggctgaatacaaa

SEQ ID NO: 413 - DNA, 19 bp, Artificial Sequence
  Synthetic
gcactctgattgacaaata

SEQ ID NO: 414 - DNA, 19 bp, Artificial Sequence
  Synthetic
tgaagtctctgattaagta

SEQ ID NO: 415 - DNA, 19 bp, Artificial Sequence
  Synthetic
tcagagagatcctcataaa

SEQ ID NO: 416 - DNA, 19 bp, Artificial Sequence
  Synthetic
gcaagaagatcaccatttc

SEQ ID NO: 417 - DNA, 19 bp, Artificial Sequence
  Synthetic
gagagaaatttgaggatga

SEQ ID NO: 418 - DNA, 19 bp, Artificial Sequence
  Synthetic
gaaaggatttggctataag

SEQ ID NO: 419 - DNA, 19 bp, Artificial Sequence
  Synthetic
gaaagaaggcatgaacatt

SEQ ID NO: 420 - DNA, 19 bp, Artificial Sequence
  Synthetic
gggagatagtgatgaagta

SEQ ID NO: 421 - DNA, 19 bp, Artificial Sequence
  Synthetic
gaagtacatccattataag

SEQ ID NO: 422 - DNA, 19 bp, Artificial Sequence
  Synthetic
gtacgacaaccgggagata

SEQ ID NO: 423 - DNA, 19 bp, Artificial Sequence
  Synthetic
agatagtgatgaagtacat

SEQ ID NO: 424 - DNA, 19 bp, Artificial Sequence
  Synthetic
tgaagactctgctcagttt

SEQ ID NO: 425 - DNA, 19 bp, Artificial Sequence
  Synthetic
gcatgcggcctctgtttga

SEQ ID NO: 426 - RNA, 19 nt, Artificial Sequence
  Synthetic
gcacacagcuuacuacauc

SEQ ID NO: 427 - RNA, 19 nt, Artificial Sequence
  Synthetic
gaaaugcccugguaucuca

SEQ ID NO: 428 - RNA, 19 nt, Artificial Sequence
  Synthetic
gaaggaacgugaugugauc

SEQ ID NO: 429 - RNA, 19 nt, Artificial Sequence
  Synthetic
gcacuacuccuguguguga

SEQ ID NO: 430 - RNA, 19 nt, Artificial Sequence
  Synthetic
gaacccagcuggagaacuu

SEQ ID NO: 431 - RNA, 19 nt, Artificial Sequence
  Synthetic
gauauacagugugaucuua

SEQ ID NO: 432 - RNA, 19 nt, Artificial Sequence
  Synthetic
guacuacgauccugauuau

SEQ ID NO: 433 - RNA, 19 nt, Artificial Sequence
  Synthetic
gugccgaccuuuacaauuu

SEQ ID NO: 434 - DNA, 19 bp, Artificial Sequence
  Synthetic
gaaggaaactgaattcaaa

SEQ ID NO: 435 - DNA, 19 bp, Artificial Sequence
  Synthetic
ggaaatatgtactacgaaa

SEQ ID NO: 436 - DNA, 19 bp, Artificial Sequence
  Synthetic
ccacaaagcagtgaattta

SEQ ID NO: 437 - DNA, 19 bp, Artificial Sequence
  Synthetic
gtaacaagctcacgcagtt

SEQ ID NO: 438 - RNA, 19 nt, Artificial Sequence
  Synthetic
gggcagggacuucggauuu

SEQ ID NO: 439 - RNA, 19 nt, Artificial Sequence
  Synthetic
gcuugauccuguugauuuu

SEQ ID NO: 440 - RNA, 19 nt, Artificial Sequence
  Synthetic
caaccaggaccuugauuuu

SEQ ID NO: 441 - RNA, 19 nt, Artificial Sequence
  Synthetic
uuaagaauccuuuggucaa

SEQ ID NO: 442 - RNA, 19 nt, Artificial Sequence
  Synthetic
ugguuuggcuauuaaagaa

SEQ ID NO: 443 - RNA, 19 nt, Artificial Sequence
  Synthetic
ggacguuccuacuggaugu

SEQ ID NO: 444 - RNA, 19 nt, Artificial Sequence
  Synthetic
ggacuucggauuugcauuu

SEQ ID NO: 445 - RNA, 19 nt, Artificial Sequence
  Synthetic
gggagcagacggcagcuaa

SEQ ID NO: 446 - RNA, 19 nt, Artificial Sequence
  Synthetic
aaacagugccgcaagagau

SEQ ID NO: 447 - RNA, 19 nt, Artificial Sequence
  Synthetic
ggagcagacggcagcuaau

SEQ ID NO: 448 - RNA, 19 nt, Artificial Sequence
  Synthetic
caaacagugccgcaagaga

SEQ ID NO: 449 - RNA, 19 nt, Artificial Sequence
  Synthetic
gggaggaagggaagugaag

SEQ ID NO: 450 - RNA, 19 nt, Artificial Sequence
  Synthetic
ucucaccucucuaggaauu

SEQ ID NO: 451 - RNA, 19 nt, Artificial Sequence
  Synthetic
gccugggccuccacgauaa

SEQ ID NO: 452 - RNA, 19 nt, Artificial Sequence
  Synthetic
gcucucaccucucuaggaa

SEQ ID NO: 453 - RNA, 19 nt, Artificial Sequence
  Synthetic
aacagugccgcaagagaua

SEQ ID NO: 454 - RNA, 19 nt, Artificial Sequence
  Synthetic
cuagaugguuuggcuauua

SEQ ID NO: 455 - RNA, 19 nt, Artificial Sequence
  Synthetic
gcuauagccaggaggucaa

SEQ ID NO: 456 - RNA, 19 nt, Artificial Sequence
  Synthetic
ggaacgggauucagaccau

SEQ ID NO: 457 - RNA, 19 nt, Artificial Sequence
  Synthetic
ucaaggauccacugggaau

SEQ ID NO: 458 - RNA, 19 nt, Artificial Sequence
  Synthetic
ucaugugccuggaaauuaa

SEQ ID NO: 459 - RNA, 19 nt, Artificial Sequence
  Synthetic
gagagagugcugagaagga

SEQ ID NO: 460 - RNA, 19 nt, Artificial Sequence
  Synthetic
agaagcaggucgggagaga

SEQ ID NO: 461 - RNA, 19 nt, Artificial Sequence
  Synthetic
aggaaggguucaugugguu

SEQ ID NO: 462 - RNA, 19 nt, Artificial Sequence
  Synthetic
gaugagagagugcugagaa

SEQ ID NO: 463 - RNA, 19 nt, Artificial Sequence
  Synthetic
caacaguccaggaggugca

SEQ ID NO: 464 - RNA, 19 nt, Artificial Sequence
  Synthetic
ccacagccauccuggacuu

SEQ ID NO: 465 - RNA, 19 nt, Artificial Sequence
  Synthetic
guguggguccugaggguca

SEQ ID NO: 466 - RNA, 19 nt, Artificial Sequence
  Synthetic
ugucagugcucggcuguaa

SEQ ID NO: 467 - RNA, 19 nt, Artificial Sequence
  Synthetic
caucaugugccuggaaauu

SEQ ID NO: 468 - RNA, 19 nt, Artificial Sequence
  Synthetic
gaagaaugaggacgagugu

SEQ ID NO: 469 - RNA, 19 nt, Artificial Sequence
  Synthetic
gaguucagguacccagaga

SEQ ID NO: 470 - RNA, 19 nt, Artificial Sequence
  Synthetic
ggacaugcagcucugauga

SEQ ID NO: 471 - RNA, 19 nt, Artificial Sequence
  Synthetic
ggagggugcuguucaagga

SEQ ID NO: 472 - RNA, 19 nt, Artificial Sequence
  Synthetic
cuccuugccuggugaccua

SEQ ID NO: 473 - RNA, 19 nt, Artificial Sequence
  Synthetic
ggacgagugugccgugugu

SEQ ID NO: 474 - RNA, 19 nt, Artificial Sequence
  Synthetic
gguggucagggcagaauuu

SEQ ID NO: 475 - RNA, 19 nt, Artificial Sequence
  Synthetic
ucuggagggugcuguucaa

SEQ ID NO: 476 - RNA, 19 nt, Artificial Sequence
  Synthetic
gccaucaugugccuggaaa

SEQ ID NO: 477 - RNA, 19 nt, Artificial Sequence
  Synthetic
guucagguacccagagaug

SEQ ID NO: 478 - RNA, 19 nt, Artificial Sequence
  Synthetic
gguggugggugccuguaau

SEQ ID NO: 479 - RNA, 19 nt, Artificial Sequence
  Synthetic
caagaagugcauccagguu

SEQ ID NO: 480 - RNA, 19 nt, Artificial Sequence
  Synthetic
ccacuucucuacucuggaa

SEQ ID NO: 481 - RNA, 19 nt, Artificial Sequence
  Synthetic
ggcaugagaaucacuugaa

SEQ ID NO: 482 - RNA, 19 nt, Artificial Sequence
  Synthetic
gggaaugccaugcucaucu

SEQ ID NO: 483 - RNA, 19 nt, Artificial Sequence
  Synthetic
gcaugagaaucacuugaac

SEQ ID NO: 484 - RNA, 19 nt, Artificial Sequence
  Synthetic
ggaaugccaugcucaucuu

SEQ ID NO: 485 - RNA, 19 nt, Artificial Sequence
  Synthetic
gagcauagcuauuuguuuu

SEQ ID NO: 486 - RNA, 19 nt, Artificial Sequence
  Synthetic
guauaaagcauguggucuu

SEQ ID NO: 487 - RNA, 19 nt, Artificial Sequence
  Synthetic
gagagaacuuggaugagaa

SEQ ID NO: 488 - RNA, 19 nt, Artificial Sequence
  Synthetic
cuugaaaugcuguuaguaa

SEQ ID NO: 489 - RNA, 19 nt, Artificial Sequence
  Synthetic
gcaaacguuucuugaacaa

SEQ ID NO: 490 - RNA, 19 nt, Artificial Sequence
  Synthetic
ugggaagaauccaguauua

SEQ ID NO: 491 - RNA, 19 nt, Artificial Sequence
  Synthetic
cugcauugccgcuguauaa

SEQ ID NO: 492 - RNA, 19 nt, Artificial Sequence
  Synthetic
cagcagggcaucuuggaaa

SEQ ID NO: 493 - RNA, 19 nt, Artificial Sequence
  Synthetic
ccagugagguggaagacuu

SEQ ID NO: 494 - RNA, 19 nt, Artificial Sequence
  Synthetic
gcaaggaucgauuugaaua

SEQ ID NO: 495 - RNA, 19 nt, Artificial Sequence
  Synthetic
gcuuaaaccaacacaauca

SEQ ID NO: 496 - RNA, 19 nt, Artificial Sequence
  Synthetic
gggaaaguccagggcuaua

SEQ ID NO: 497 - RNA, 19 nt, Artificial Sequence
  Synthetic
cugcaaggaucgauuugaa

SEQ ID NO: 498 - RNA, 19 nt, Artificial Sequence
  Synthetic
ggacgaacuccuccagcaa

SEQ ID NO: 499 - RNA, 19 nt, Artificial Sequence
  Synthetic
gugaccaggaagagggaga

SEQ ID NO: 500 - RNA, 19 nt, Artificial Sequence
  Synthetic
ggagagaacuuggaugaga

SEQ ID NO: 501 - RNA, 19 nt, Artificial Sequence
  Synthetic
cagaggagcuggcugucaa

SEQ ID NO: 502 - RNA, 19 nt, Artificial Sequence
  Synthetic
gcagaaugucucuuaauau

SEQ ID NO: 503 - RNA, 19 nt, Artificial Sequence
  Synthetic
ccuacacagcggucagaua

SEQ ID NO: 504 - RNA, 19 nt, Artificial Sequence
  Synthetic
cguguggguucuaguaaau

SEQ ID NO: 505 - RNA, 19 nt, Artificial Sequence
  Synthetic
gaaacugcccuguggacau

SEQ ID NO: 506 - RNA, 19 nt, Artificial Sequence
  Synthetic
gaggacugcucaugugauu

SEQ ID NO: 507 - RNA, 19 nt, Artificial Sequence
  Synthetic
ggcagcaagcuuugguuua

SEQ ID NO: 508 - RNA, 19 nt, Artificial Sequence
  Synthetic
aagcuuugguuuaugguuu

SEQ ID NO: 509 - RNA, 19 nt, Artificial Sequence
  Synthetic
ucccaaaucucuucaaauu

SEQ ID NO: 510 - RNA, 19 nt, Artificial Sequence
  Synthetic
ccaggaagagggagaaacu

SEQ ID NO: 511 - RNA, 19 nt, Artificial Sequence
  Synthetic
caguggaagagguggucau

SEQ ID NO: 512 - RNA, 19 nt, Artificial Sequence
  Synthetic
acauguuguuauuuggcaa

SEQ ID NO: 513 - RNA, 19 nt, Artificial Sequence
  Synthetic
cagagaagguaagguguga

SEQ ID NO: 514 - RNA, 19 nt, Artificial Sequence
  Synthetic
gaagggagaccucgcuuaa

SEQ ID NO: 515 - RNA, 19 nt, Artificial Sequence
  Synthetic
ccaugaaggugaagauuaa

SEQ ID NO: 516 - RNA, 19 nt, Artificial Sequence
  Synthetic
gccaugaaggugaagauua

SEQ ID NO: 517 - RNA, 19 nt, Artificial Sequence
  Synthetic
gcaacaagguggaaacaag

SEQ ID NO: 518 - RNA, 19 nt, Artificial Sequence
  Synthetic
gaauggaaguucaaggagu

SEQ ID NO: 519 - RNA, 19 nt, Artificial Sequence
  Synthetic
cgccaggaauggaaguuca

SEQ ID NO: 520 - RNA, 19 nt, Artificial Sequence
  Synthetic
gaugcugcccugacugcaa

SEQ ID NO: 521 - RNA, 19 nt, Artificial Sequence
  Synthetic
aucacuauguugacacuuu

SEQ ID NO: 522 - RNA, 19 nt, Artificial Sequence
  Synthetic
ucugcaggauggcauuuaa

SEQ ID NO: 523 - RNA, 19 nt, Artificial Sequence
  Synthetic
ucacuauguugacacuuuu

SEQ ID NO: 524 - RNA, 19 nt, Artificial Sequence
  Synthetic
gggcuggagcugcguuugu

SEQ ID NO: 525 - RNA, 19 nt, Artificial Sequence
  Synthetic
gcccauuugagaucuuuga

SEQ ID NO: 526 - RNA, 19 nt, Artificial Sequence
  Synthetic
ggccaacgaugagaacugu

SEQ ID NO: 527 - RNA, 19 nt, Artificial Sequence
  Synthetic
ugaaggugaagauuaagug

SEQ ID NO: 528 - RNA, 19 nt, Artificial Sequence
  Synthetic
ggcuggagcugcguuuguu

SEQ ID NO: 529 - RNA, 19 nt, Artificial Sequence
  Synthetic
gagcuaacguguaagcaaa

SEQ ID NO: 530 - RNA, 19 nt, Artificial Sequence
  Synthetic
ggccagggacugugauaua

SEQ ID NO: 531 - RNA, 19 nt, Artificial Sequence
  Synthetic
ggagcuaacguguaagcaa

SEQ ID NO: 532 - RNA, 19 nt, Artificial Sequence
  Synthetic
gcuacaaccgcgugggcau

SEQ ID NO: 533 - RNA, 19 nt, Artificial Sequence
  Synthetic
cccaggagcuaacguguaa

SEQ ID NO: 534 - RNA, 19 nt, Artificial Sequence
  Synthetic
cguuggaccucacuggcaa

SEQ ID NO: 535 - RNA, 19 nt, Artificial Sequence
  Synthetic
ggaaagugggauggcagua

SEQ ID NO: 536 - RNA, 19 nt, Artificial Sequence
  Synthetic
gcuugugcccugcuggaaa

SEQ ID NO: 537 - RNA, 19 nt, Artificial Sequence
  Synthetic
cacccuaggcgcuggauuu

SEQ ID NO: 538 - RNA, 19 nt, Artificial Sequence
  Synthetic
uguggcugcuggaggauau

SEQ ID NO: 539 - RNA, 19 nt, Artificial Sequence
  Synthetic
uaugggaccugaagaggau

SEQ ID NO: 540 - RNA, 19 nt, Artificial Sequence
  Synthetic
gcguuguaccggcacuuua

SEQ ID NO: 541 - RNA, 19 nt, Artificial Sequence
  Synthetic
cagaagcagugccgcaagu

SEQ ID NO: 542 - RNA, 19 nt, Artificial Sequence
  Synthetic
gcacaccggucuccagguu

SEQ ID NO: 543 - RNA, 19 nt, Artificial Sequence
  Synthetic
gaagaggauggcagacugu

SEQ ID NO: 544 - RNA, 19 nt, Artificial Sequence
  Synthetic
ggagaucaagagagguaug

SEQ ID NO: 545 - RNA, 19 nt, Artificial Sequence
  Synthetic
acaccggucuccagguugu

SEQ ID NO: 546 - RNA, 19 nt, Artificial Sequence
  Synthetic
uaccggcacuuuauauaua

SEQ ID NO: 547 - RNA, 19 nt, Artificial Sequence
  Synthetic
uguaccggcacuuuauaua

SEQ ID NO: 548 - RNA, 19 nt, Artificial Sequence
  Synthetic
guaccggcacuuuauauau

SEQ ID NO: 549 - RNA, 19 nt, Artificial Sequence
  Synthetic
gcuaacguguaagcaaaca

SEQ ID NO: 550 - RNA, 19 nt, Artificial Sequence
  Synthetic
gcaguacccgcuucaucua

SEQ ID NO: 551 - RNA, 19 nt, Artificial Sequence
  Synthetic
ggugaucgcggugcaggaa

SEQ ID NO: 552 - RNA, 19 nt, Artificial Sequence
  Synthetic
gaaagugggauggcaguac

SEQ ID NO: 553 - RNA, 19 nt, Artificial Sequence
  Synthetic
agucgucguucgccuucua

SEQ ID NO: 554 - RNA, 19 nt, Artificial Sequence
  Synthetic
guacccgcuucaucuagua

SEQ ID NO: 555 - RNA, 19 nt, Artificial Sequence
  Synthetic
ggcaguacccgcuucaucu

SEQ ID NO: 556 - RNA, 19 nt, Artificial Sequence
  Synthetic
guuguaccggcacuuuaua

SEQ ID NO: 557 - RNA, 19 nt, Artificial Sequence
  Synthetic
uaacguguaagcaaacaug

SEQ ID NO: 558 - RNA, 19 nt, Artificial Sequence
  Synthetic
gccagggacugugauauac

SEQ ID NO: 559 - RNA, 19 nt, Artificial Sequence
  Synthetic
gggaaugacuauagguaaa

SEQ ID NO: 560 - RNA, 19 nt, Artificial Sequence
  Synthetic
ugauaaaccucaugagaaa

SEQ ID NO: 561 - RNA, 19 nt, Artificial Sequence
  Synthetic
gcaaaguuguuaacggaaa

SEQ ID NO: 562 - RNA, 19 nt, Artificial Sequence
  Synthetic
ggaaagagguagucacaga

SEQ ID NO: 563 - RNA, 19 nt, Artificial Sequence
  Synthetic
gagaacaaaucguggaaga

SEQ ID NO: 564 - RNA, 19 nt, Artificial Sequence
  Synthetic
gcacauugaaggaggagaa

SEQ ID NO: 565 - RNA, 19 nt, Artificial Sequence
  Synthetic
cguggaaacuguagaauau

SEQ ID NO: 566 - RNA, 19 nt, Artificial Sequence
  Synthetic
agucauagagacagaauua

SEQ ID NO: 567 - RNA, 19 nt, Artificial Sequence
  Synthetic
cauugaaggaggagaacaa

SEQ ID NO: 568 - RNA, 19 nt, Artificial Sequence
  Synthetic
cuacaaagacauuagcaaa

SEQ ID NO: 569 - RNA, 19 nt, Artificial Sequence
  Synthetic
guauggagcugcagaagaa

SEQ ID NO: 570 - RNA, 19 nt, Artificial Sequence
  Synthetic
ugaccaauauacugggaaa

SEQ ID NO: 571 - RNA, 19 nt, Artificial Sequence
  Synthetic
agacagaauuagugaagca

SEQ ID NO: 572 - RNA, 19 nt, Artificial Sequence
  Synthetic
agagguagucacagagaaa

SEQ ID NO: 573 - RNA, 19 nt, Artificial Sequence
  Synthetic
ggaagaagguugucaaacu

SEQ ID NO: 574 - RNA, 19 nt, Artificial Sequence
  Synthetic
cugcaaagaauauggaaaa

SEQ ID NO: 575 - RNA, 19 nt, Artificial Sequence
  Synthetic
agaagaaaucacugaacua

SEQ ID NO: 576 - RNA, 19 nt, Artificial Sequence
  Synthetic
ggaaguaauuggaucugaa

SEQ ID NO: 577 - RNA, 19 nt, Artificial Sequence
  Synthetic
agaaaugacaguugcuuaa

SEQ ID NO: 578 - RNA, 19 nt, Artificial Sequence
  Synthetic
aaggguaagugaagguuua

SEQ ID NO: 579 - RNA, 19 nt, Artificial Sequence
  Synthetic
acaggaaauuacaagguua

SEQ ID NO: 580 - RNA, 19 nt, Artificial Sequence
  Synthetic
gguaacaagaugugacuuu

SEQ ID NO: 581 - RNA, 19 nt, Artificial Sequence
  Synthetic
guagaguugucuuggcaaa

SEQ ID NO: 582 - RNA, 19 nt, Artificial Sequence
  Synthetic
gaacuauaagguacagaaa

SEQ ID NO: 583 - RNA, 19 nt, Artificial Sequence
  Synthetic
ccagaaaauuaguuggaau

SEQ ID NO: 584 - RNA, 19 nt, Artificial Sequence
  Synthetic
agucacagagaaaggguaa

SEQ ID NO: 585 - RNA, 19 nt, Artificial Sequence
  Synthetic
ggauguugcuugauuuuaa

SEQ ID NO: 586 - RNA, 19 nt, Artificial Sequence
  Synthetic
ggcaaaugcuuauuacuua

SEQ ID NO: 587 - RNA, 19 nt, Artificial Sequence
  Synthetic
gugaaauguuacccaauua

SEQ ID NO: 588 - RNA, 19 nt, Artificial Sequence
  Synthetic
gaagaagguugucaaacua

SEQ ID NO: 589 - RNA, 19 nt, Artificial Sequence
  Synthetic
ccaagcagaucuagagaau

SEQ ID NO: 590 - RNA, 19 nt, Artificial Sequence
  Synthetic
ccaagcagaucuagagaau

SEQ ID NO: 591 - RNA, 19 nt, Artificial Sequence
  Synthetic
aaagagaagcuaauggaaa

SEQ ID NO: 592 - RNA, 19 nt, Artificial Sequence
  Synthetic
aagaauaaccaguccauua

SEQ ID NO: 593 - RNA, 19 nt, Artificial Sequence
  Synthetic
gggauaaagagaagcuaau

SEQ ID NO: 594 - RNA, 19 nt, Artificial Sequence
  Synthetic
aaagagaagcuaauggaaa

SEQ ID NO: 595 - RNA, 19 nt, Artificial Sequence
  Synthetic
aagaauaaccaguccauua

SEQ ID NO: 596 - RNA, 19 nt, Artificial Sequence
  Synthetic
gggauaaagagaagcuaau

SEQ ID NO: 597 - RNA, 19 nt, Artificial Sequence
  Synthetic
ccaauauccugaugcuaaa

SEQ ID NO: 598 - RNA, 19 nt, Artificial Sequence
  Synthetic
augcagugcuggagugaau

SEQ ID NO: 599 - RNA, 19 nt, Artificial Sequence
  Synthetic
ccaauauccugaugcuaaa

SEQ ID NO: 600 - RNA, 19 nt, Artificial Sequence
  Synthetic
augcagugcuggagugaau

SEQ ID NO: 601 - RNA, 19 nt, Artificial Sequence
  Synthetic
ggucaucagcacaggauau

SEQ ID NO: 602 - RNA, 19 nt, Artificial Sequence
  Synthetic
ggucaucagcacaggauau

SEQ ID NO: 603 - RNA, 19 nt, Artificial Sequence
  Synthetic
agaaaguacaagacaagua

SEQ ID NO: 604 - RNA, 19 nt, Artificial Sequence
  Synthetic
cgaacacgccagaugaaua

SEQ ID NO: 605 - RNA, 19 nt, Artificial Sequence
  Synthetic
ugagaauggcccugcauaa

SEQ ID NO: 606 - RNA, 19 nt, Artificial Sequence
  Synthetic
agaaaguacaagacaagua

SEQ ID NO: 607 - RNA, 19 nt, Artificial Sequence
  Synthetic
cgaacacgccagaugaaua

SEQ ID NO: 608 - RNA, 19 nt, Artificial Sequence
  Synthetic
ugagaauggcccugcauaa

SEQ ID NO: 609 - RNA, 19 nt, Artificial Sequence
  Synthetic
uggaagaaggcauggguca

SEQ ID NO: 610 - RNA, 19 nt, Artificial Sequence
  Synthetic
uggaagaaggcauggguca

SEQ ID NO: 611 - RNA, 19 nt, Artificial Sequence
  Synthetic
auaaugaggaugaugcaaa

SEQ ID NO: 612 - RNA, 19 nt, Artificial Sequence
  Synthetic
gugauaucuuaguggauga

SEQ ID NO: 613 - RNA, 19 nt, Artificial Sequence
  Synthetic
augagcaggaggaggauua

SEQ ID NO: 614 - RNA, 19 nt, Artificial Sequence
  Synthetic
augcaaaggcagcaagaga

SEQ ID NO: 615 - RNA, 19 nt, Artificial Sequence
  Synthetic
cgagauauuucccaagauu

SEQ ID NO: 616 - RNA, 19 nt, Artificial Sequence
  Synthetic
auaaugaggaugaugcaaa

SEQ ID NO: 617 - RNA, 19 nt, Artificial Sequence
  Synthetic
gugauaucuuaguggauga

SEQ ID NO: 618 - RNA, 19 nt, Artificial Sequence
  Synthetic
cgagauauuucccaagauu

SEQ ID NO: 619 - RNA, 19 nt, Artificial Sequence
  Synthetic
augagcaggaggaggauua

SEQ ID NO: 620 - RNA, 19 nt, Artificial Sequence
  Synthetic
augcaaaggcagcaagaga

SEQ ID NO: 621 - RNA, 19 nt, Artificial Sequence
  Synthetic
aaauaauggaagaaggcau

SEQ ID NO: 622 - RNA, 19 nt, Artificial Sequence
  Synthetic
gauauaaagcagaaaguac

SEQ ID NO: 623 - RNA, 19 nt, Artificial Sequence
  Synthetic
ccagaugaauacaagguca

SEQ ID NO: 624 - RNA, 19 nt, Artificial Sequence
  Synthetic
guggaugacaacacaguua

SEQ ID NO: 625 - RNA, 19 nt, Artificial Sequence
  Synthetic
ugggauaaagagaagcuaa

SEQ ID NO: 626 - RNA, 19 nt, Artificial Sequence
  Synthetic
agcagaaaguacaagacaa

SEQ ID NO: 627 - RNA, 19 nt, Artificial Sequence
  Synthetic
ccagaugaauacaagguca

SEQ ID NO: 628 - RNA, 19 nt, Artificial Sequence
  Synthetic
guggaugacaacacaguua

SEQ ID NO: 629 - RNA, 19 nt, Artificial Sequence
  Synthetic
agcagaaaguacaagacaa

SEQ ID NO: 630 - RNA, 19 nt, Artificial Sequence
  Synthetic
aaauaauggaagaaggcau

SEQ ID NO: 631 - RNA, 19 nt, Artificial Sequence
  Synthetic
gauauaaagcagaaaguac

SEQ ID NO: 632 - RNA, 19 nt, Artificial Sequence
  Synthetic
ugggauaaagagaagcuaa

SEQ ID NO: 633 - RNA, 19 nt, Artificial Sequence
  Synthetic
gaaggauggugguuguaau

SEQ ID NO: 634 - RNA, 19 nt, Artificial Sequence
  Synthetic
gaauuguaaagcagaguuu

SEQ ID NO: 635 - RNA, 19 nt, Artificial Sequence
  Synthetic
ggauaugccuugucagauc

SEQ ID NO: 636 - RNA, 19 nt, Artificial Sequence
  Synthetic
guccauuaucuuugagaau

SEQ ID NO: 637 - RNA, 19 nt, Artificial Sequence
  Synthetic
gugcuggagugaauauuua

SEQ ID NO: 638 - RNA, 19 nt, Artificial Sequence
  Synthetic
aagagaagcuaauggaaag

SEQ ID NO: 639 - RNA, 19 nt, Artificial Sequence
  Synthetic
gcagaaaguacaagacaag

SEQ ID NO: 640 - RNA, 19 nt, Artificial Sequence
  Synthetic
cggacgagggcuacaacua

SEQ ID NO: 641 - RNA, 19 nt, Artificial Sequence
  Synthetic
ggauaugccuugucagauc

SEQ ID NO: 642 - RNA, 19 nt, Artificial Sequence
  Synthetic
guccauuaucuuugagaau

SEQ ID NO: 643 - RNA, 19 nt, Artificial Sequence
  Synthetic
gugcuggagugaauauuua

SEQ ID NO: 644 - RNA, 19 nt, Artificial Sequence
  Synthetic
aagagaagcuaauggaaag

SEQ ID NO: 645 - RNA, 19 nt, Artificial Sequence
  Synthetic
cggacgagggcuacaacua

SEQ ID NO: 646 - RNA, 19 nt, Artificial Sequence
  Synthetic
gaaggauggugguuguaau

SEQ ID NO: 647 - RNA, 19 nt, Artificial Sequence
  Synthetic
gaauuguaaagcagaguuu

SEQ ID NO: 648 - RNA, 19 nt, Artificial Sequence
  Synthetic
gcagaaaguacaagacaag

SEQ ID NO: 649 - RNA, 19 nt, Artificial Sequence
  Synthetic
ggaagaagcuguuugaaua

SEQ ID NO: 650 - RNA, 19 nt, Artificial Sequence
  Synthetic
aaggcaaacuauaggauaa

SEQ ID NO: 651 - RNA, 19 nt, Artificial Sequence
  Synthetic
ugaagaauugagagagaaa

SEQ ID NO: 652 - RNA, 19 nt, Artificial Sequence
  Synthetic
cuggcaaguuucagagaua

SEQ ID NO: 653 - RNA, 19 nt, Artificial Sequence
  Synthetic
cagagauauuggacagaua

SEQ ID NO: 654 - RNA, 19 nt, Artificial Sequence
  Synthetic
gauuaggaguauagcaaau

SEQ ID NO: 655 - RNA, 19 nt, Artificial Sequence
  Synthetic
guaugcaguuugugcgaaa

SEQ ID NO: 656 - RNA, 19 nt, Artificial Sequence
  Synthetic
aggaagaagaagaagaaga

SEQ ID NO: 657 - RNA, 19 nt, Artificial Sequence
  Synthetic
aaugaagaauugagagaga

SEQ ID NO: 658 - RNA, 19 nt, Artificial Sequence
  Synthetic
aggagagggucaugaacaa

SEQ ID NO: 659 - RNA, 19 nt, Artificial Sequence
  Synthetic
ggagaacagauuaggagua

SEQ ID NO: 660 - RNA, 19 nt, Artificial Sequence
  Synthetic
gggaagcccucaagaagua

SEQ ID NO: 661 - RNA, 19 nt, Artificial Sequence
  Synthetic
caacuuggcuggaugcuaa

SEQ ID NO: 662 - RNA, 19 nt, Artificial Sequence
  Synthetic
ggguagaggccauguugaa

SEQ ID NO: 663 - RNA, 19 nt, Artificial Sequence
  Synthetic
gagaaaggacacaguauuu

SEQ ID NO: 664 - RNA, 19 nt, Artificial Sequence
  Synthetic
aggaagaagcuguuugaau

SEQ ID NO: 665 - RNA, 19 nt, Artificial Sequence
  Synthetic
ggagaacccugcugaaaga

SEQ ID NO: 666 - RNA, 19 nt, Artificial Sequence
  Synthetic
gguccgagauccuguacua

SEQ ID NO: 667 - RNA, 19 nt, Artificial Sequence
  Synthetic
cagcaugccuccugccuua

SEQ ID NO: 668 - RNA, 19 nt, Artificial Sequence
  Synthetic
gcaacgaggucuucuguuu

SEQ ID NO: 669 - RNA, 19 nt, Artificial Sequence
  Synthetic
ugacccaaauugugaggaa

SEQ ID NO: 670 - RNA, 19 nt, Artificial Sequence
  Synthetic
ccuuugaucccgaggagua

SEQ ID NO: 671 - RNA, 19 nt, Artificial Sequence
  Synthetic
agcuagaggcacagacaua

SEQ ID NO: 672 - RNA, 19 nt, Artificial Sequence
  Synthetic
uacaaaggguggaagagaa

SEQ ID NO: 673 - RNA, 19 nt, Artificial Sequence
  Synthetic
aagaagaagaagaagacga

SEQ ID NO: 674 - RNA, 19 nt, Artificial Sequence
  Synthetic
gagaacagauuaggaguau

SEQ ID NO: 675 - RNA, 19 nt, Artificial Sequence
  Synthetic
acaucugcauugagaagaa

SEQ ID NO: 676 - RNA, 19 nt, Artificial Sequence
  Synthetic
acagcaaugaagaggacua

SEQ ID NO: 677 - RNA, 19 nt, Artificial Sequence
  Synthetic
gcuugcagcuagaggcaca

SEQ ID NO: 678 - RNA, 19 nt, Artificial Sequence
  Synthetic
ccacgagacuccuugguuu

SEQ ID NO: 679 - RNA, 19 nt, Artificial Sequence
  Synthetic
guacauacuugcagauuua

SEQ ID NO: 680 - RNA, 19 nt, Artificial Sequence
  Synthetic
guucaaaggaggaggauga

SEQ ID NO: 681 - RNA, 19 nt, Artificial Sequence
  Synthetic
ggaagaaagauuaggcaau

SEQ ID NO: 682 - RNA, 19 nt, Artificial Sequence
  Synthetic
gcagauaagaguugaauau

SEQ ID NO: 683 - RNA, 19 nt, Artificial Sequence
  Synthetic
ccaaagauggcaugacuua

SEQ ID NO: 684 - RNA, 19 nt, Artificial Sequence
  Synthetic
gcgcagauuuggaagcauu

SEQ ID NO: 685 - RNA, 19 nt, Artificial Sequence
  Synthetic
guauaaagauccucuagaa

SEQ ID NO: 686 - RNA, 19 nt, Artificial Sequence
  Synthetic
gaacagaauacaacccaua

SEQ ID NO: 687 - RNA, 19 nt, Artificial Sequence
  Synthetic
cuacaugucucuuguuuua

SEQ ID NO: 688 - RNA, 19 nt, Artificial Sequence
  Synthetic
guaaauaaagucagcugaa

SEQ ID NO: 689 - RNA, 19 nt, Artificial Sequence
  Synthetic
uauauggaguucugaguua

SEQ ID NO: 690 - RNA, 19 nt, Artificial Sequence
  Synthetic
ggaagauacagcagacaua

SEQ ID NO: 691 - RNA, 19 nt, Artificial Sequence
  Synthetic
ggucauuccuccuggguuu

SEQ ID NO: 692 - RNA, 19 nt, Artificial Sequence
  Synthetic
ggacagaaaugcaguucau

SEQ ID NO: 693 - RNA, 19 nt, Artificial Sequence
  Synthetic
ucaagugauuggauagaaa

SEQ ID NO: 694 - RNA, 19 nt, Artificial Sequence
  Synthetic
ggcccagagucgagaggaa

SEQ ID NO: 695 - RNA, 19 nt, Artificial Sequence
  Synthetic
gaacaaugauaccguuuua

SEQ ID NO: 696 - RNA, 19 nt, Artificial Sequence
  Synthetic
gauuaaagccuucuaguau

SEQ ID NO: 697 - RNA, 19 nt, Artificial Sequence
  Synthetic
gcugagaggcuuauacuaa

SEQ ID NO: 698 - RNA, 19 nt, Artificial Sequence
  Synthetic
gugcauaaauccaguuuga

SEQ ID NO: 699 - RNA, 19 nt, Artificial Sequence
  Synthetic
agaacagcaugguaaauaa

SEQ ID NO: 700 - RNA, 19 nt, Artificial Sequence
  Synthetic
ggaagcagcaccugggaau

SEQ ID NO: 701 - RNA, 19 nt, Artificial Sequence
  Synthetic
gaaugguguuuaugaagaa

SEQ ID NO: 702 - RNA, 19 nt, Artificial Sequence
  Synthetic
gcauaaauccaguuugaga

SEQ ID NO: 703 - RNA, 19 nt, Artificial Sequence
  Synthetic
ggugagggguuuuagauaa

SEQ ID NO: 704 - RNA, 19 nt, Artificial Sequence
  Synthetic
gggauuggguccugcugaa

SEQ ID NO: 705 - RNA, 19 nt, Artificial Sequence
  Synthetic
cgauuaaagccuucuagua

SEQ ID NO: 706 - RNA, 19 nt, Artificial Sequence
  Synthetic
caugggaagcaauguguua

SEQ ID NO: 707 - RNA, 19 nt, Artificial Sequence
  Synthetic
ggucguaaucugaaggagu

SEQ ID NO: 708 - RNA, 19 nt, Artificial Sequence
  Synthetic
uaugagaacagcaugguaa

SEQ ID NO: 709 - RNA, 19 nt, Artificial Sequence
  Synthetic
cagaagauguccucguaga

SEQ ID NO: 710 - RNA, 19 nt, Artificial Sequence
  Synthetic
gagucgagaggaagaagaa

SEQ ID NO: 711 - RNA, 19 nt, Artificial Sequence
  Synthetic
ugagaaugguguuuaugaa

SEQ ID NO: 712 - RNA, 19 nt, Artificial Sequence
  Synthetic
cugagaggcuuauacuaaa

SEQ ID NO: 713 - RNA, 19 nt, Artificial Sequence
  Synthetic
gagaacagcaugguaaaua

SEQ ID NO: 714 - RNA, 19 nt, Artificial Sequence
  Synthetic
ggaugaaccuggaaugaac

SEQ ID NO: 715 - RNA, 19 nt, Artificial Sequence
  Synthetic
ccucaggagccuauugcaa

SEQ ID NO: 716 - RNA, 19 nt, Artificial Sequence
  Synthetic
uuucauagcugccaaauau

SEQ ID NO: 717 - RNA, 19 nt, Artificial Sequence
  Synthetic
ugaacuugcugguugguuu

SEQ ID NO: 718 - RNA, 19 nt, Artificial Sequence
  Synthetic
gaacaguccucgggugauu

SEQ ID NO: 719 - RNA, 19 nt, Artificial Sequence
  Synthetic
gaaacgugguccucaguga

SEQ ID NO: 720 - RNA, 19 nt, Artificial Sequence
  Synthetic
ccuaagggcuugagugaaa

SEQ ID NO: 721 - RNA, 19 nt, Artificial Sequence
  Synthetic
ccucaaagcuugcccaaua

SEQ ID NO: 722 - RNA, 19 nt, Artificial Sequence
  Synthetic
ccagagcgauggagggauu

SEQ ID NO: 723 - RNA, 19 nt, Artificial Sequence
  Synthetic
ccucagguuuggagcgaga

SEQ ID NO: 724 - RNA, 19 nt, Artificial Sequence
  Synthetic
gcgccaacaccauggacua

SEQ ID NO: 725 - RNA, 19 nt, Artificial Sequence
  Synthetic
ugacauacgaagaggagcu

SEQ ID NO: 726 - RNA, 19 nt, Artificial Sequence
  Synthetic
gguccgaggaagaagagga

SEQ ID NO: 727 - RNA, 19 nt, Artificial Sequence
  Synthetic
guccuaagggcuugaguga

SEQ ID NO: 728 - RNA, 19 nt, Artificial Sequence
  Synthetic
agguguggaugcugcaauu

SEQ ID NO: 729 - RNA, 19 nt, Artificial Sequence
  Synthetic
ucgcugaccaggaugggaa

SEQ ID NO: 730 - RNA, 19 nt, Artificial Sequence
  Synthetic
ccaggucgcugcagcauuu

SEQ ID NO: 731 - RNA, 19 nt, Artificial Sequence
  Synthetic
caacaucgcugaccaggau

SEQ ID NO: 732 - RNA, 19 nt, Artificial Sequence
  Synthetic
caacauccgugcucugaga

SEQ ID NO: 733 - RNA, 19 nt, Artificial Sequence
  Synthetic
gacucuggucucugacaua

SEQ ID NO: 734 - RNA, 19 nt, Artificial Sequence
  Synthetic
aaacccuguaugugcauua

SEQ ID NO: 735 - RNA, 19 nt, Artificial Sequence
  Synthetic
ccugauuccgucuuugaua

SEQ ID NO: 736 - RNA, 19 nt, Artificial Sequence
  Synthetic
gcuaccugcagcuggauuu

SEQ ID NO: 737 - RNA, 19 nt, Artificial Sequence
  Synthetic
ugaugaagacacacuccua

SEQ ID NO: 738 - RNA, 19 nt, Artificial Sequence
  Synthetic
ucauguggagcccagaaua

SEQ ID NO: 739 - RNA, 19 nt, Artificial Sequence
  Synthetic
ccuucugucugucuguauu

SEQ ID NO: 740 - RNA, 19 nt, Artificial Sequence
  Synthetic
gaguuggucuccagaagag

SEQ ID NO: 741 - RNA, 19 nt, Artificial Sequence
  Synthetic
gcagccgggugaugucuga

SEQ ID NO: 742 - RNA, 19 nt, Artificial Sequence
  Synthetic
ugaguuggucuccagaaga

SEQ ID NO: 743 - RNA, 19 nt, Artificial Sequence
  Synthetic
uugagggcgugcucuacua

SEQ ID NO: 744 - RNA, 19 nt, Artificial Sequence
  Synthetic
gcaauucccaaugcagaga

SEQ ID NO: 745 - RNA, 19 nt, Artificial Sequence
  Synthetic
cugauuccgucuuugauac

SEQ ID NO: 746 - RNA, 19 nt, Artificial Sequence
  Synthetic
ggagggauuuccgcuucaa

SEQ ID NO: 747 - RNA, 19 nt, Artificial Sequence
  Synthetic
cuagauguccauggccuuu

SEQ ID NO: 748 - RNA, 19 nt, Artificial Sequence
  Synthetic
gccgggugaugucugauga

SEQ ID NO: 749 - RNA, 19 nt, Artificial Sequence
  Synthetic
gcaggcagguguggaugcu

SEQ ID NO: 750 - RNA, 19 nt, Artificial Sequence
  Synthetic
guagaaaugcucagggcaa

SEQ ID NO: 751 - RNA, 19 nt, Artificial Sequence
  Synthetic
cgucaaaggaaauagaaaa

SEQ ID NO: 752 - RNA, 19 nt, Artificial Sequence
  Synthetic
ggguagacugugugaagaa

SEQ ID NO: 753 - RNA, 19 nt, Artificial Sequence
  Synthetic
ggauagcagaagagaucua

SEQ ID NO: 754 - RNA, 19 nt, Artificial Sequence
  Synthetic
ucuauaucgucaaaggaaa

SEQ ID NO: 755 - RNA, 19 nt, Artificial Sequence
  Synthetic
uagaaaugcucagggcaaa

SEQ ID NO: 756 - RNA, 19 nt, Artificial Sequence
  Synthetic
uggagauccugcuggcaaa

SEQ ID NO: 757 - RNA, 19 nt, Artificial Sequence
  Synthetic
ggagcuaaccugaagcgua

SEQ ID NO: 758 - RNA, 19 nt, Artificial Sequence
  Synthetic
cuauaucgucaaaggaaau

SEQ ID NO: 759 - RNA, 19 nt, Artificial Sequence
  Synthetic
ucgucaaaggaaauagaaa

SEQ ID NO: 760 - RNA, 19 nt, Artificial Sequence
  Synthetic
agagaucuaugguggaauu

SEQ ID NO: 761 - RNA, 19 nt, Artificial Sequence
  Synthetic
gaagagaucuaugguggaa

SEQ ID NO: 762 - RNA, 19 nt, Artificial Sequence
  Synthetic
gagcuaaccugaagcguag

SEQ ID NO: 763 - RNA, 19 nt, Artificial Sequence
  Synthetic
gaucuaugguggaauuuca

SEQ ID NO: 764 - RNA, 19 nt, Artificial Sequence
  Synthetic
aaaagaagcggcuaggaua

SEQ ID NO: 765 - RNA, 19 nt, Artificial Sequence
  Synthetic
cggucgagcaugucaucaa

SEQ ID NO: 766 - RNA, 19 nt, Artificial Sequence
  Synthetic
uaggauagcagaagagauc

SEQ ID NO: 767 - RNA, 19 nt, Artificial Sequence
  Synthetic
caaugugaaccuugugaca

SEQ ID NO: 768 - RNA, 19 nt, Artificial Sequence
  Synthetic
gaaaagaagcggcuaggau

SEQ ID NO: 769 - RNA, 19 nt, Artificial Sequence
  Synthetic
gguagacugugugaagaaa

SEQ ID NO: 770 - RNA, 19 nt, Artificial Sequence
  Synthetic
ucaaugugcugcuggaguu

SEQ ID NO: 771 - RNA, 19 nt, Artificial Sequence
  Synthetic
acagagagugcauggagau

SEQ ID NO: 772 - RNA, 19 nt, Artificial Sequence
  Synthetic
agauccugcuggcaaauaa

SEQ ID NO: 773 - RNA, 19 nt, Artificial Sequence
  Synthetic
ggaagaugguccuguuuuc

SEQ ID NO: 774 - RNA, 19 nt, Artificial Sequence
  Synthetic
ggccugugccaaagccuua

SEQ ID NO: 775 - RNA, 19 nt, Artificial Sequence
  Synthetic
ugaagagaggucacagaga

SEQ ID NO: 776 - RNA, 19 nt, Artificial Sequence
  Synthetic
gaggguagacugugugaag

SEQ ID NO: 777 - RNA, 19 nt, Artificial Sequence
  Synthetic
cagagccacucgaacgauu

SEQ ID NO: 778 - RNA, 19 nt, Artificial Sequence
  Synthetic
ccauuucuauaucgucaaa

SEQ ID NO: 779 - RNA, 19 nt, Artificial Sequence
  Synthetic
gagagugcauggagauccu

SEQ ID NO: 780 - RNA, 19 nt, Artificial Sequence
  Synthetic
ucacguagcuggagagcau

SEQ ID NO: 781 - RNA, 19 nt, Artificial Sequence
  Synthetic
gggcagacccugacuacaa

SEQ ID NO: 782 - RNA, 19 nt, Artificial Sequence
  Synthetic
ccgacaaggaggaggagga

SEQ ID NO: 783 - RNA, 19 nt, Artificial Sequence
  Synthetic
acaagaugauaaaggcauu

SEQ ID NO: 784 - RNA, 19 nt, Artificial Sequence
  Synthetic
aggccaacgucaaagcuaa

SEQ ID NO: 785 - RNA, 19 nt, Artificial Sequence
  Synthetic
acacugacacagaggagaa

SEQ ID NO: 786 - RNA, 19 nt, Artificial Sequence
  Synthetic
cgucaaagcuaaacuacca

SEQ ID NO: 787 - RNA, 19 nt, Artificial Sequence
  Synthetic
gugcagaggccaacgucaa

SEQ ID NO: 788 - RNA, 19 nt, Artificial Sequence
  Synthetic
gaguauauccagcuguuaa

SEQ ID NO: 789 - RNA, 19 nt, Artificial Sequence
  Synthetic
ccaucaaccagcuggauau

SEQ ID NO: 790 - RNA, 19 nt, Artificial Sequence
  Synthetic
ccaucauaauugugagcca

SEQ ID NO: 791 - RNA, 19 nt, Artificial Sequence
  Synthetic
ccuaaaacaccaacuguaa

SEQ ID NO: 792 - RNA, 19 nt, Artificial Sequence
  Synthetic
ugauaaaggcauugcauug

SEQ ID NO: 793 - RNA, 19 nt, Artificial Sequence
  Synthetic
ggccaacgucaaagcuaaa

SEQ ID NO: 794 - RNA, 19 nt, Artificial Sequence
  Synthetic
ccacuugagcuguuugcaa

SEQ ID NO: 795 - RNA, 19 nt, Artificial Sequence
  Synthetic
gcgccaggagcguuacaaa

SEQ ID NO: 796 - RNA, 19 nt, Artificial Sequence
  Synthetic
ggacuguguacgugugcuu

SEQ ID NO: 797 - RNA, 19 nt, Artificial Sequence
  Synthetic
guuacaaacguuucaucaa

SEQ ID NO: 798 - RNA, 19 nt, Artificial Sequence
  Synthetic
gaagcaggcucucaaucaa

SEQ ID NO: 799 - RNA, 19 nt, Artificial Sequence
  Synthetic
ugaccucacaagaugauaa

SEQ ID NO: 800 - RNA, 19 nt, Artificial Sequence
  Synthetic
agucugggcaucaaacaua

SEQ ID NO: 801 - RNA, 19 nt, Artificial Sequence
  Synthetic
ggaggaggacacugacaca

SEQ ID NO: 802 - RNA, 19 nt, Artificial Sequence
  Synthetic
ucucaaucaagcaguguau

SEQ ID NO: 803 - RNA, 19 nt, Artificial Sequence
  Synthetic
auugugagccagaguauau

SEQ ID NO: 804 - RNA, 19 nt, Artificial Sequence
  Synthetic
aggaggaggaggacacuga

SEQ ID NO: 805 - RNA, 19 nt, Artificial Sequence
  Synthetic
ucaaucaagcaguguauga

SEQ ID NO: 806 - RNA, 19 nt, Artificial Sequence
  Synthetic
cagaguauauccagcuguu

SEQ ID NO: 807 - RNA, 19 nt, Artificial Sequence
  Synthetic
aaaucugccuccaucauaa

SEQ ID NO: 808 - RNA, 19 nt, Artificial Sequence
  Synthetic
gccaucaaccagcuggaua

SEQ ID NO: 809 - RNA, 19 nt, Artificial Sequence
  Synthetic
gcgcuuggcugcuucuuau

SEQ ID NO: 810 - RNA, 19 nt, Artificial Sequence
  Synthetic
ccacuaagguuuugguaau

SEQ ID NO: 811 - RNA, 19 nt, Artificial Sequence
  Synthetic
ggaaauuugucuucaguau

SEQ ID NO: 812 - RNA, 19 nt, Artificial Sequence
  Synthetic
cguccuaaacugagaagaa

SEQ ID NO: 813 - RNA, 19 nt, Artificial Sequence
  Synthetic
ggagaagauugccaaguua

SEQ ID NO: 814 - RNA, 19 nt, Artificial Sequence
  Synthetic
cgugauugcuguagauaga

SEQ ID NO: 815 - RNA, 19 nt, Artificial Sequence
  Synthetic
cggccaaggucaagaaugu

SEQ ID NO: 816 - RNA, 19 nt, Artificial Sequence
  Synthetic
gagacagugugccgggaaa

SEQ ID NO: 817 - RNA, 19 nt, Artificial Sequence
  Synthetic
ggaagaagccgucugacua

SEQ ID NO: 818 - RNA, 19 nt, Artificial Sequence
  Synthetic
gcacugaguuucuuaggaa

SEQ ID NO: 819 - RNA, 19 nt, Artificial Sequence
  Synthetic
ccaagugcuucgaguacua

SEQ ID NO: 820 - RNA, 19 nt, Artificial Sequence
  Synthetic
gugucaaagugcugcucaa

SEQ ID NO: 821 - RNA, 19 nt, Artificial Sequence
  Synthetic
cgagaugcuuaucgaguuu

SEQ ID NO: 822 - RNA, 19 nt, Artificial Sequence
  Synthetic
gagaagauugccaaguuaa

SEQ ID NO: 823 - RNA, 19 nt, Artificial Sequence
  Synthetic
gcaucuggacugugucaaa

SEQ ID NO: 824 - RNA, 19 nt, Artificial Sequence
  Synthetic
agaagauugccaaguuaaa

SEQ ID NO: 825 - RNA, 19 nt, Artificial Sequence
  Synthetic
gggcauuguugcugauucu

SEQ ID NO: 826 - RNA, 19 nt, Artificial Sequence
  Synthetic
gggaagaagccgucugacu

SEQ ID NO: 827 - RNA, 19 nt, Artificial Sequence
  Synthetic
ccaacgugaaugcggcaaa

SEQ ID NO: 828 - RNA, 19 nt, Artificial Sequence
  Synthetic
cggcaaagcuucaugagac

SEQ ID NO: 829 - RNA, 19 nt, Artificial Sequence
  Synthetic
agccauagguggagcauuc

SEQ ID NO: 830 - RNA, 19 nt, Artificial Sequence
  Synthetic
gaaggugugucaaggugua

SEQ ID NO: 831 - RNA, 19 nt, Artificial Sequence
  Synthetic
gcagggugaacuugaggaa

SEQ ID NO: 832 - RNA, 19 nt, Artificial Sequence
  Synthetic
ggcaaagcuucaugagacu

SEQ ID NO: 833 - RNA, 19 nt, Artificial Sequence
  Synthetic
gcuaacuccuugaagcuau

SEQ ID NO: 834 - RNA, 19 nt, Artificial Sequence
  Synthetic
guccuaaacugagaagaaa

SEQ ID NO: 835 - RNA, 19 nt, Artificial Sequence
  Synthetic
gggccaaucuggaagcgca

SEQ ID NO: 836 - RNA, 19 nt, Artificial Sequence
  Synthetic
ccgccaagugcuucgagua

SEQ ID NO: 837 - RNA, 19 nt, Artificial Sequence
  Synthetic
cugcaacagcugaucgaga

SEQ ID NO: 838 - RNA, 19 nt, Artificial Sequence
  Synthetic
ggaggacuuugcaugauua

SEQ ID NO: 839 - RNA, 19 nt, Artificial Sequence
  Synthetic
uggagaagauugccaaguu

SEQ ID NO: 840 - RNA, 19 nt, Artificial Sequence
  Synthetic
ucucagagcucuaaagaua

SEQ ID NO: 841 - RNA, 19 nt, Artificial Sequence
  Synthetic
acauaaagauccagacauu

SEQ ID NO: 842 - RNA, 19 nt, Artificial Sequence
  Synthetic
ccuaaagaacagaugaaua

SEQ ID NO: 843 - RNA, 19 nt, Artificial Sequence
  Synthetic
gagacaaccuccucugaaa

SEQ ID NO: 844 - RNA, 19 nt, Artificial Sequence
  Synthetic
aaauaaagcccaucaucaa

SEQ ID NO: 845 - RNA, 19 nt, Artificial Sequence
  Synthetic
guugaaggcuggacaucua

SEQ ID NO: 846 - RNA, 19 nt, Artificial Sequence
  Synthetic
ggaucagagaauuaacaaa

SEQ ID NO: 847 - RNA, 19 nt, Artificial Sequence
  Synthetic
aauuacuucugcagaguua

SEQ ID NO: 848 - RNA, 19 nt, Artificial Sequence
  Synthetic
augcuggaucagagaauua

SEQ ID NO: 849 - RNA, 19 nt, Artificial Sequence
  Synthetic
caagaaagccucacuucaa

SEQ ID NO: 850 - RNA, 19 nt, Artificial Sequence
  Synthetic
ggcuggacaucuacaguua

SEQ ID NO: 851 - RNA, 19 nt, Artificial Sequence
  Synthetic
gcagucaaauggcaaauua

SEQ ID NO: 852 - RNA, 19 nt, Artificial Sequence
  Synthetic
aagcauauguccuuuacaa

SEQ ID NO: 853 - RNA, 19 nt, Artificial Sequence
  Synthetic
caaauaaagcccaucauca

SEQ ID NO: 854 - RNA, 19 nt, Artificial Sequence
  Synthetic
cuggaaagguuguucgagu

SEQ ID NO: 855 - RNA, 19 nt, Artificial Sequence
  Synthetic
gguuaacugccuccagaua

SEQ ID NO: 856 - RNA, 19 nt, Artificial Sequence
  Synthetic
ggaaagguuguucgaguga

SEQ ID NO: 857 - RNA, 19 nt, Artificial Sequence
  Synthetic
ggaagucagcuuuguauuu

SEQ ID NO: 858 - RNA, 19 nt, Artificial Sequence
  Synthetic
aaacauuugugccgccuaa

SEQ ID NO: 859 - RNA, 19 nt, Artificial Sequence
  Synthetic
cugcagaguuaacccuuua

SEQ ID NO: 860 - RNA, 19 nt, Artificial Sequence
  Synthetic
gaacuauggguaugacaca

SEQ ID NO: 861 - RNA, 19 nt, Artificial Sequence
  Synthetic
gauacuaaguucugugaag

SEQ ID NO: 862 - RNA, 19 nt, Artificial Sequence
  Synthetic
ccgccuaaagauccggaaa

SEQ ID NO: 863 - RNA, 19 nt, Artificial Sequence
  Synthetic
gaaaugcaugggacgguua

SEQ ID NO: 864 - RNA, 19 nt, Artificial Sequence
  Synthetic
gaguuaacccuuuacauuu

SEQ ID NO: 865 - RNA, 19 nt, Artificial Sequence
  Synthetic
cgccuaaagauccggaaau

SEQ ID NO: 866 - RNA, 19 nt, Artificial Sequence
  Synthetic
gggccaaugucaauuacuu

SEQ ID NO: 867 - RNA, 19 nt, Artificial Sequence
  Synthetic
ugcaauacacucugaaaga

SEQ ID NO: 868 - RNA, 19 nt, Artificial Sequence
  Synthetic
uugcccacauggagacaaa

SEQ ID NO: 869 - RNA, 19 nt, Artificial Sequence
  Synthetic
aauacgaccuuuauggaca

SEQ ID NO: 870 - RNA, 19 nt, Artificial Sequence
  Synthetic
gagaaacacccuugacuuu

SEQ ID NO: 871 - RNA, 19 nt, Artificial Sequence
  Synthetic
ccuucugauugcugugaaa

SEQ ID NO: 872 - RNA, 19 nt, Artificial Sequence
  Synthetic
gcaugaagcagccaagcaa

SEQ ID NO: 873 - RNA, 19 nt, Artificial Sequence
  Synthetic
uauaagacacucugggaau

SEQ ID NO: 874 - RNA, 19 nt, Artificial Sequence
  Synthetic
gaccugugauggagaaaca

SEQ ID NO: 875 - RNA, 19 nt, Artificial Sequence
  Synthetic
uggaugaagcugaugaaaa

SEQ ID NO: 876 - RNA, 19 nt, Artificial Sequence
  Synthetic
cgacucugaucaaacauaa

SEQ ID NO: 877 - RNA, 19 nt, Artificial Sequence
  Synthetic
ggagaaacacccuugacuu

SEQ ID NO: 878 - RNA, 19 nt, Artificial Sequence
  Synthetic
cuauaagacacucugggaa

SEQ ID NO: 879 - RNA, 19 nt, Artificial Sequence
  Synthetic
aagcuggucugguggaaaa

SEQ ID NO: 880 - RNA, 19 nt, Artificial Sequence
  Synthetic
ucagcuaaguauucaagaa

SEQ ID NO: 881 - RNA, 19 nt, Artificial Sequence
  Synthetic
augcaauggaugaagcuga

SEQ ID NO: 882 - RNA, 19 nt, Artificial Sequence
  Synthetic
auucaagaccugugaugga

SEQ ID NO: 883 - RNA, 19 nt, Artificial Sequence
  Synthetic
ccuaagugcucaaaacaga

SEQ ID NO: 884 - RNA, 19 nt, Artificial Sequence
  Synthetic
gucaagcgauggucagcaa

SEQ ID NO: 885 - RNA, 19 nt, Artificial Sequence
  Synthetic
aggcuaaugugcugacuga

SEQ ID NO: 886 - RNA, 19 nt, Artificial Sequence
  Synthetic
gcccugagaugcugaaaca

SEQ ID NO: 887 - RNA, 19 nt, Artificial Sequence
  Synthetic
uuguggagacugugagcaa

SEQ ID NO: 888 - RNA, 19 nt, Artificial Sequence
  Synthetic
ccgagcugcugcugcguua

SEQ ID NO: 889 - RNA, 19 nt, Artificial Sequence
  Synthetic
cccuggaaguccugcuuaa

SEQ ID NO: 890 - RNA, 19 nt, Artificial Sequence
  Synthetic
caccuagguucaagcgauu

SEQ ID NO: 891 - RNA, 19 nt, Artificial Sequence
  Synthetic
caacaugauuguggagacu

SEQ ID NO: 892 - RNA, 19 nt, Artificial Sequence
  Synthetic
gcgccaaguugcugcugga

SEQ ID NO: 893 - RNA, 19 nt, Artificial Sequence
  Synthetic
ccuggaggcuggagcugau

SEQ ID NO: 894 - RNA, 19 nt, Artificial Sequence
  Synthetic
ccaacaugauuguggagac

SEQ ID NO: 895 - RNA, 19 nt, Artificial Sequence
  Synthetic
ucgccgcacugcuggacua

SEQ ID NO: 896 - RNA, 19 nt, Artificial Sequence
  Synthetic
agacccagcuguccaccaa

SEQ ID NO: 897 - RNA, 19 nt, Artificial Sequence
  Synthetic
caccacaccuggcugauuu

SEQ ID NO: 898 - RNA, 19 nt, Artificial Sequence
  Synthetic
gcccgaggcuacacagacu

SEQ ID NO: 899 - RNA, 19 nt, Artificial Sequence
  Synthetic
gcuuaaugccuauccuugu

SEQ ID NO: 900 - RNA, 19 nt, Artificial Sequence
  Synthetic
acaccuggcugauuuugua

SEQ ID NO: 901 - RNA, 19 nt, Artificial Sequence
  Synthetic
ucccagagcuguggaagga

SEQ ID NO: 902 - RNA, 19 nt, Artificial Sequence
  Synthetic
gguccaagcccuguuccaa

SEQ ID NO: 903 - RNA, 19 nt, Artificial Sequence
  Synthetic
ugaaacacugcgccaacuu

SEQ ID NO: 904 - RNA, 19 nt, Artificial Sequence
  Synthetic
agcaacauguggcucugua

SEQ ID NO: 905 - RNA, 19 nt, Artificial Sequence
  Synthetic
ggagugcaguggcgcuauc

SEQ ID NO: 906 - RNA, 19 nt, Artificial Sequence
  Synthetic
ccaggucccaugccaagaa

SEQ ID NO: 907 - RNA, 19 nt, Artificial Sequence
  Synthetic
cuucuccuccuguguuuaa

SEQ ID NO: 908 - RNA, 19 nt, Artificial Sequence
  Synthetic
caacugggagccugaaguc

SEQ ID NO: 909 - RNA, 19 nt, Artificial Sequence
  Synthetic
uccaagcccuguuccaaga

SEQ ID NO: 910 - RNA, 19 nt, Artificial Sequence
  Synthetic
uggaaguccugcuuaaugc

SEQ ID NO: 911 - RNA, 19 nt, Artificial Sequence
  Synthetic
agagagaccuuccccuuca

SEQ ID NO: 912 - RNA, 19 nt, Artificial Sequence
  Synthetic
gcccuggaaguccugcuua

SEQ ID NO: 913 - RNA, 19 nt, Artificial Sequence
  Synthetic
ucaccacaccuggcugauu

SEQ ID NO: 914 - RNA, 19 nt, Artificial Sequence
  Synthetic
cuggaaguccugcuuaaug

SEQ ID NO: 915 - RNA, 19 nt, Artificial Sequence
  Synthetic
auauguaacuggaggauua

SEQ ID NO: 916 - RNA, 19 nt, Artificial Sequence
  Synthetic
gaguaagaguaaugguuga

SEQ ID NO: 917 - RNA, 19 nt, Artificial Sequence
  Synthetic
gaguaaugguugaucguga

SEQ ID NO: 918 - RNA, 19 nt, Artificial Sequence
  Synthetic
gcacugauauggagaacuu

SEQ ID NO: 919 - RNA, 19 nt, Artificial Sequence
  Synthetic
caaagauccaugugaacua

SEQ ID NO: 920 - RNA, 19 nt, Artificial Sequence
  Synthetic
auacaaagauccaugugaa

SEQ ID NO: 921 - RNA, 19 nt, Artificial Sequence
  Synthetic
gaguaaagccugccacauu

SEQ ID NO: 922 - RNA, 19 nt, Artificial Sequence
  Synthetic
cugcaaucuccuugacaaa

SEQ ID NO: 923 - RNA, 19 nt, Artificial Sequence
  Synthetic
ggaaucaacuauuaaccaa

SEQ ID NO: 924 - RNA, 19 nt, Artificial Sequence
  Synthetic
ccuucgagaguaagaguaa

SEQ ID NO: 925 - RNA, 19 nt, Artificial Sequence
  Synthetic
caucaggaaucaacuauua

SEQ ID NO: 926 - RNA, 19 nt, Artificial Sequence
  Synthetic
agacuauguucaagacaga

SEQ ID NO: 927 - RNA, 19 nt, Artificial Sequence
  Synthetic
ucaaggaaauaaagacaca

SEQ ID NO: 928 - RNA, 19 nt, Artificial Sequence
  Synthetic
agucaaggaaauaaagaca

SEQ ID NO: 929 - RNA, 19 nt, Artificial Sequence
  Synthetic
guucaagacagaaguugua

SEQ ID NO: 930 - RNA, 19 nt, Artificial Sequence
  Synthetic
acagcugaguuuaggaaga

SEQ ID NO: 931 - RNA, 19 nt, Artificial Sequence
  Synthetic
gaggauuacaguaugcuua

SEQ ID NO: 932 - RNA, 19 nt, Artificial Sequence
  Synthetic
aguaaugguugaucgugaa

SEQ ID NO: 933 - RNA, 19 nt, Artificial Sequence
  Synthetic
cagacuaaccaucaggaau

SEQ ID NO: 934 - RNA, 19 nt, Artificial Sequence
  Synthetic
aggaagacauccaauuauu

SEQ ID NO: 935 - RNA, 19 nt, Artificial Sequence
  Synthetic
uuacauugcauuuguggaa

SEQ ID NO: 936 - RNA, 19 nt, Artificial Sequence
  Synthetic
gaagcaauauauucugcaa

SEQ ID NO: 937 - RNA, 19 nt, Artificial Sequence
  Synthetic
uuacaucuuugcagacuaa

SEQ ID NO: 938 - RNA, 19 nt, Artificial Sequence
  Synthetic
uguauggcuuagaaguuaa

SEQ ID NO: 939 - RNA, 19 nt, Artificial Sequence
  Synthetic
acgcacuacucacagauua

SEQ ID NO: 940 - RNA, 19 nt, Artificial Sequence
  Synthetic
cacugaaauaugugugaau

SEQ ID NO: 941 - RNA, 19 nt, Artificial Sequence
  Synthetic
gaaccaaggauuuacagau

SEQ ID NO: 942 - RNA, 19 nt, Artificial Sequence
  Synthetic
gagaguaagaguaaugguu

SEQ ID NO: 943 - RNA, 19 nt, Artificial Sequence
  Synthetic
gaaauaaagacacagcuga

SEQ ID NO: 944 - RNA, 19 nt, Artificial Sequence
  Synthetic
ggauaucacuguuacgaac

SEQ ID NO: 945 - RNA, 19 nt, Artificial Sequence
  Synthetic
caacaaaucccgagagaca

SEQ ID NO: 946 - RNA, 19 nt, Artificial Sequence
  Synthetic
gggcagagcuugagguguu

SEQ ID NO: 947 - RNA, 19 nt, Artificial Sequence
  Synthetic
ucgaaaggccauugggaaa

SEQ ID NO: 948 - RNA, 19 nt, Artificial Sequence
  Synthetic
cagaaugugucaaggagaa

SEQ ID NO: 949 - RNA, 19 nt, Artificial Sequence
  Synthetic
ccaaagacuaagaugaaga

SEQ ID NO: 950 - RNA, 19 nt, Artificial Sequence
  Synthetic
ccacuugacuucagagcuu

SEQ ID NO: 951 - RNA, 19 nt, Artificial Sequence
  Synthetic
gcgcgaacaucgacgccua

SEQ ID NO: 952 - RNA, 19 nt, Artificial Sequence
  Synthetic
cuccaaagacuaagaugaa

SEQ ID NO: 953 - RNA, 19 nt, Artificial Sequence
  Synthetic
ggagaagaaucauuuguuu

SEQ ID NO: 954 - RNA, 19 nt, Artificial Sequence
  Synthetic
caggcaggcugauuagaua

SEQ ID NO: 955 - RNA, 19 nt, Artificial Sequence
  Synthetic
gggccgucaucaaggagaa

SEQ ID NO: 956 - RNA, 19 nt, Artificial Sequence
  Synthetic
augaggaggugguggaguu

SEQ ID NO: 957 - RNA, 19 nt, Artificial Sequence
  Synthetic
ccaagaacgccuacggcau

SEQ ID NO: 958 - RNA, 19 nt, Artificial Sequence
  Synthetic
aggaacacaucgacagcuu

SEQ ID NO: 959 - RNA, 19 nt, Artificial Sequence
  Synthetic
gauaaaggccaucaaggau

SEQ ID NO: 960 - RNA, 19 nt, Artificial Sequence
  Synthetic
acgcggaggccgugaagau

SEQ ID NO: 961 - RNA, 19 nt, Artificial Sequence
  Synthetic
gcucgcggcugaaggaaca

SEQ ID NO: 962 - RNA, 19 nt, Artificial Sequence
  Synthetic
ccugcaagaaugagcauga

SEQ ID NO: 963 - RNA, 19 nt, Artificial Sequence
  Synthetic
gaacagaaugugucaagga

SEQ ID NO: 964 - RNA, 19 nt, Artificial Sequence
  Synthetic
guggacaguuggaggccuu

SEQ ID NO: 965 - RNA, 19 nt, Artificial Sequence
  Synthetic
ucaucaaggagaaggcaga

SEQ ID NO: 966 - RNA, 19 nt, Artificial Sequence
  Synthetic
gaagaggccuugaagacca

SEQ ID NO: 967 - RNA, 19 nt, Artificial Sequence
  Synthetic
ccgugaagauucuggugca

SEQ ID NO: 968 - RNA, 19 nt, Artificial Sequence
  Synthetic
cuacgaggccugcaagaau

SEQ ID NO: 969 - RNA, 19 nt, Artificial Sequence
  Synthetic
cugauuagauaccugaaau

SEQ ID NO: 970 - RNA, 19 nt, Artificial Sequence
  Synthetic
gaaaggccauugggaaaua

SEQ ID NO: 971 - RNA, 19 nt, Artificial Sequence
  Synthetic
aguuggaggccuugagguu

SEQ ID NO: 972 - RNA, 19 nt, Artificial Sequence
  Synthetic
cgaaaggccauugggaaau

SEQ ID NO: 973 - RNA, 19 nt, Artificial Sequence
  Synthetic
agaaugagcaugaggaggu

SEQ ID NO: 974 - RNA, 19 nt, Artificial Sequence
  Synthetic
ccaugaucaaggaagggaa

SEQ ID NO: 975 - RNA, 19 nt, Artificial Sequence
  Synthetic
gcauaaagcuucacuggaa

SEQ ID NO: 976 - RNA, 19 nt, Artificial Sequence
  Synthetic
gcuaauaaacugugauguu

SEQ ID NO: 977 - RNA, 19 nt, Artificial Sequence
  Synthetic
ugaagauugccuagaaaua

SEQ ID NO: 978 - RNA, 19 nt, Artificial Sequence
  Synthetic
caauuaaagcacaagcaaa

SEQ ID NO: 979 - RNA, 19 nt, Artificial Sequence
  Synthetic
ccagaagccuacauaauua

SEQ ID NO: 980 - RNA, 19 nt, Artificial Sequence
  Synthetic
aggcaauguuaaagucuua

SEQ ID NO: 981 - RNA, 19 nt, Artificial Sequence
  Synthetic
cuagaaagcuugagcauac

SEQ ID NO: 982 - RNA, 19 nt, Artificial Sequence
  Synthetic
caguauggcaagcuagaaa

SEQ ID NO: 983 - RNA, 19 nt, Artificial Sequence
  Synthetic
gcucagaauggaaugcaua

SEQ ID NO: 984 - RNA, 19 nt, Artificial Sequence
  Synthetic
agucaaggacauuggaaaa

SEQ ID NO: 985 - RNA, 19 nt, Artificial Sequence
  Synthetic
gguauuaggagcucagaau

SEQ ID NO: 986 - RNA, 19 nt, Artificial Sequence
  Synthetic
gaaauucgguccagucuaa

SEQ ID NO: 987 - RNA, 19 nt, Artificial Sequence
  Synthetic
gcuucaacacggagcaaau

SEQ ID NO: 988 - RNA, 19 nt, Artificial Sequence
  Synthetic
acgagaaguuuucgauauu

SEQ ID NO: 989 - RNA, 19 nt, Artificial Sequence
  Synthetic
uguugaaaauggacagaua

SEQ ID NO: 990 - RNA, 19 nt, Artificial Sequence
  Synthetic
gagcaaauguuaauggauc

SEQ ID NO: 991 - RNA, 19 nt, Artificial Sequence
  Synthetic
acauuaagaugaagaccuu

SEQ ID NO: 992 - RNA, 19 nt, Artificial Sequence
  Synthetic
cagggaaggcaauguuaaa

SEQ ID NO: 993 - RNA, 19 nt, Artificial Sequence
  Synthetic
caugaagauugccuagaaa

SEQ ID NO: 994 - RNA, 19 nt, Artificial Sequence
  Synthetic
gaaauauggagcccagaua

SEQ ID NO: 995 - RNA, 19 nt, Artificial Sequence
  Synthetic
augaagacguucugaggau

SEQ ID NO: 996 - RNA, 19 nt, Artificial Sequence
  Synthetic
cagcuauucaagauggaua

SEQ ID NO: 997 - RNA, 19 nt, Artificial Sequence
  Synthetic
gugcaaaugucaauuguca

SEQ ID NO: 998 - RNA, 19 nt, Artificial Sequence
  Synthetic
gauguuacuucuagugcua

SEQ ID NO: 999 - RNA, 19 nt, Artificial Sequence
  Synthetic
ggccaguaguucagugaga

SEQ ID NO: 1000 - RNA, 19 nt, Artificial Sequence
  Synthetic
gcaacuacuuuagaagaaa

SEQ ID NO: 1001 - RNA, 19 nt, Artificial Sequence
  Synthetic
ggauaaaucagugaaacua

SEQ ID NO: 1002 - RNA, 19 nt, Artificial Sequence
  Synthetic
aagucaaggacauuggaaa

SEQ ID NO: 1003 - RNA, 19 nt, Artificial Sequence
  Synthetic
aauauggagcccagauaaa

SEQ ID NO: 1004 - RNA, 19 nt, Artificial Sequence
  Synthetic
caacuagccuucccaguaa

SEQ ID NO: 1005 - RNA, 19 nt, Artificial Sequence
  Synthetic
ccaaguuaguuaagagaaa

SEQ ID NO: 1006 - RNA, 19 nt, Artificial Sequence
  Synthetic
augaugacuuggagaaaua

SEQ ID NO: 1007 - RNA, 19 nt, Artificial Sequence
  Synthetic
acaaaguggagaagagcua

SEQ ID NO: 1008 - RNA, 19 nt, Artificial Sequence
  Synthetic
cuacaaagccgaagucaau

SEQ ID NO: 1009 - RNA, 19 nt, Artificial Sequence
  Synthetic
gcuuuaaggagcaggagua

SEQ ID NO: 1010 - RNA, 19 nt, Artificial Sequence
  Synthetic
gcacacuguuauaagcaaa

SEQ ID NO: 1011 - RNA, 19 nt, Artificial Sequence
  Synthetic
agaaaggugaauaguguua

SEQ ID NO: 1012 - RNA, 19 nt, Artificial Sequence
  Synthetic
ccagaaaggugaauagugu

SEQ ID NO: 1013 - RNA, 19 nt, Artificial Sequence
  Synthetic
aagccaaucucauggauau

SEQ ID NO: 1014 - RNA, 19 nt, Artificial Sequence
  Synthetic
acuacaaagccgaagucaa

SEQ ID NO: 1015 - RNA, 19 nt, Artificial Sequence
  Synthetic
gaagaugagaauaugguuu

SEQ ID NO: 1016 - RNA, 19 nt, Artificial Sequence
  Synthetic
ugugagagcuagaaugaga

SEQ ID NO: 1017 - RNA, 19 nt, Artificial Sequence
  Synthetic
uuggagaaauacugggauu

SEQ ID NO: 1018 - RNA, 19 nt, Artificial Sequence
  Synthetic
aagucgaagaugagaauau

SEQ ID NO: 1019 - RNA, 19 nt, Artificial Sequence
  Synthetic
aaacagaaugacugaucua

SEQ ID NO: 1020 - RNA, 19 nt, Artificial Sequence
  Synthetic
acagaaugacugaucuaaa

SEQ ID NO: 1021 - RNA, 19 nt, Artificial Sequence
  Synthetic
gcaaauagauguggacacu

SEQ ID NO: 1022 - RNA, 19 nt, Artificial Sequence
  Synthetic
ccacaguuccauaagguga

SEQ ID NO: 1023 - RNA, 19 nt, Artificial Sequence
  Synthetic
ccaguuuaaugaaagcuaa

SEQ ID NO: 1024 - RNA, 19 nt, Artificial Sequence
  Synthetic
gucagcagguugaggaaga

SEQ ID NO: 1025 - RNA, 19 nt, Artificial Sequence
  Synthetic
ggugugagagcuagaauga

SEQ ID NO: 1026 - RNA, 19 nt, Artificial Sequence
  Synthetic
agucuagguuugcuugaaa

SEQ ID NO: 1027 - RNA, 19 nt, Artificial Sequence
  Synthetic
gagaugugccauuagaaga

SEQ ID NO: 1028 - RNA, 19 nt, Artificial Sequence
  Synthetic
gcuuugcacuuuuguacaa

SEQ ID NO: 1029 - RNA, 19 nt, Artificial Sequence
  Synthetic
ggagcugccaaguuaguua

SEQ ID NO: 1030 - RNA, 19 nt, Artificial Sequence
  Synthetic
gugaaugcccacauggaga

SEQ ID NO: 1031 - RNA, 19 nt, Artificial Sequence
  Synthetic
ugaaauggccaauguggau

SEQ ID NO: 1032 - RNA, 19 nt, Artificial Sequence
  Synthetic
ucggaaaauugaaggcuau

SEQ ID NO: 1033 - RNA, 19 nt, Artificial Sequence
  Synthetic
gaugaugacuuggagaaau

SEQ ID NO: 1034 - RNA, 19 nt, Artificial Sequence
  Synthetic
uuacacaacagaugccaua

SEQ ID NO: 1035 - RNA, 19 nt, Artificial Sequence
  Synthetic
gggcauagauguugaccaa

SEQ ID NO: 1036 - RNA, 19 nt, Artificial Sequence
  Synthetic
gcaagagaguauuguauaa

SEQ ID NO: 1037 - RNA, 19 nt, Artificial Sequence
  Synthetic
gaaauaaagcuguagcaua

SEQ ID NO: 1038 - RNA, 19 nt, Artificial Sequence
  Synthetic
gcacagaaauuguaaacuu

SEQ ID NO: 1039 - RNA, 19 nt, Artificial Sequence
  Synthetic
aaacaagggcuuagaguau

SEQ ID NO: 1040 - RNA, 19 nt, Artificial Sequence
  Synthetic
gaggagaagucuuagauuu

SEQ ID NO: 1041 - RNA, 19 nt, Artificial Sequence
  Synthetic
cauuauuaucacaggguua

SEQ ID NO: 1042 - RNA, 19 nt, Artificial Sequence
  Synthetic
ggauagggaccuuuaaaua

SEQ ID NO: 1043 - RNA, 19 nt, Artificial Sequence
  Synthetic
caacguuacugaagaauuu

SEQ ID NO: 1044 - RNA, 19 nt, Artificial Sequence
  Synthetic
caacaauccagcacagaaa

SEQ ID NO: 1045 - RNA, 19 nt, Artificial Sequence
  Synthetic
gaaauaaagcuccuaguaa

SEQ ID NO: 1046 - RNA, 19 nt, Artificial Sequence
  Synthetic
gcauagauguugaccaaga

SEQ ID NO: 1047 - RNA, 19 nt, Artificial Sequence
  Synthetic
ucacaucaguccaaggaua

SEQ ID NO: 1048 - RNA, 19 nt, Artificial Sequence
  Synthetic
uggaguaacccaaggacaa

SEQ ID NO: 1049 - RNA, 19 nt, Artificial Sequence
  Synthetic
uaacuauacuugagugcaa

SEQ ID NO: 1050 - RNA, 19 nt, Artificial Sequence
  Synthetic
ggauauugcuucaacauga

SEQ ID NO: 1051 - RNA, 19 nt, Artificial Sequence
  Synthetic
gccaauaagagaaguaaau

SEQ ID NO: 1052 - RNA, 19 nt, Artificial Sequence
  Synthetic
caaggaagcggcaaggaua

SEQ ID NO: 1053 - RNA, 19 nt, Artificial Sequence
  Synthetic
ucacaggguuauaauguaa

SEQ ID NO: 1054 - RNA, 19 nt, Artificial Sequence
  Synthetic
caguaugguggaaaggaua

SEQ ID NO: 1055 - RNA, 19 nt, Artificial Sequence
  Synthetic
uaucuuagcuugaguauga

SEQ ID NO: 1056 - RNA, 19 nt, Artificial Sequence
  Synthetic
caauauacccucuuguuua

SEQ ID NO: 1057 - RNA, 19 nt, Artificial Sequence
  Synthetic
caguaaaggucaccaugaa

SEQ ID NO: 1058 - RNA, 19 nt, Artificial Sequence
  Synthetic
ccugagauauuuagaacau

SEQ ID NO: 1059 - RNA, 19 nt, Artificial Sequence
  Synthetic
gcuagaauuuggagcagau

SEQ ID NO: 1060 - RNA, 19 nt, Artificial Sequence
  Synthetic
ggucuauguucuucaacua

SEQ ID NO: 1061 - RNA, 19 nt, Artificial Sequence
  Synthetic
aaaggcaaauauugggaua

SEQ ID NO: 1062 - RNA, 19 nt, Artificial Sequence
  Synthetic
gagcagauaucaaugccaa

SEQ ID NO: 1063 - RNA, 19 nt, Artificial Sequence
  Synthetic
gcuggaagcaggagcuaau

SEQ ID NO: 1064 - RNA, 19 nt, Artificial Sequence
  Synthetic
gagcuaauguaaaugcaau

SEQ ID NO: 1065 - RNA, 19 nt, Artificial Sequence
  Synthetic
gggcaaagcuauagacaug

SEQ ID NO: 1066 - RNA, 19 nt, Artificial Sequence
  Synthetic
cagugcagcuggagaggaa

SEQ ID NO: 1067 - RNA, 19 nt, Artificial Sequence
  Synthetic
gggcuuggauugauguuua

SEQ ID NO: 1068 - RNA, 19 nt, Artificial Sequence
  Synthetic
cgggauccuucaugagaaa

SEQ ID NO: 1069 - RNA, 19 nt, Artificial Sequence
  Synthetic
gcacggaagacgagagcca

SEQ ID NO: 1070 - RNA, 19 nt, Artificial Sequence
  Synthetic
gggcuagacacgaagcuua

SEQ ID NO: 1071 - RNA, 19 nt, Artificial Sequence
  Synthetic
ccgacaggcugaaguggua

SEQ ID NO: 1072 - RNA, 19 nt, Artificial Sequence
  Synthetic
gaccaugacuucugcuaaa

SEQ ID NO: 1073 - RNA, 19 nt, Artificial Sequence
  Synthetic
gaaccugggcuaagaguuu

SEQ ID NO: 1074 - RNA, 19 nt, Artificial Sequence
  Synthetic
gggcuaagaguuuggcauu

SEQ ID NO: 1075 - RNA, 19 nt, Artificial Sequence
  Synthetic
gggacaaagaggaggccca

SEQ ID NO: 1076 - RNA, 19 nt, Artificial Sequence
  Synthetic
gugcagggcuagacacgaa

SEQ ID NO: 1077 - RNA, 19 nt, Artificial Sequence
  Synthetic
acacgaagcuuaaacuauu

SEQ ID NO: 1078 - RNA, 19 nt, Artificial Sequence
  Synthetic
cggcagacagcuauauuua

SEQ ID NO: 1079 - RNA, 19 nt, Artificial Sequence
  Synthetic
gagaaaagccagccaggua

SEQ ID NO: 1080 - RNA, 19 nt, Artificial Sequence
  Synthetic
acacauuaagccagaauuu

SEQ ID NO: 1081 - RNA, 19 nt, Artificial Sequence
  Synthetic
cugagcugcuggagaggaa

SEQ ID NO: 1082 - RNA, 19 nt, Artificial Sequence
  Synthetic
cugaguagcuggcauuaua

SEQ ID NO: 1083 - RNA, 19 nt, Artificial Sequence
  Synthetic
gauaagcugaggugacuaa

SEQ ID NO: 1084 - RNA, 19 nt, Artificial Sequence
  Synthetic
gcaaagaagcaccacucua

SEQ ID NO: 1085 - RNA, 19 nt, Artificial Sequence
  Synthetic
gcacaguggcuccguggaa

SEQ ID NO: 1086 - RNA, 19 nt, Artificial Sequence
  Synthetic
ggcuagacacgaagcuuaa

SEQ ID NO: 1087 - RNA, 19 nt, Artificial Sequence
  Synthetic
cuguggaugugaaggucaa

SEQ ID NO: 1088 - RNA, 19 nt, Artificial Sequence
  Synthetic
ccuuggagcugaugucaau

SEQ ID NO: 1089 - RNA, 19 nt, Artificial Sequence
  Synthetic
ugaagaagagcccgcauaa

SEQ ID NO: 1090 - RNA, 19 nt, Artificial Sequence
  Synthetic
cgucaaggccaccaccaaa

SEQ ID NO: 1091 - RNA, 19 nt, Artificial Sequence
  Synthetic
gaggugacuaaaugauaua

SEQ ID NO: 1092 - RNA, 19 nt, Artificial Sequence
  Synthetic
guaaacaccucuggggaua

SEQ ID NO: 1093 - RNA, 19 nt, Artificial Sequence
  Synthetic
agguaaagaucacacugaa

SEQ ID NO: 1094 - RNA, 19 nt, Artificial Sequence
  Synthetic
ccacaauacugagaacauu

SEQ ID NO: 1095 - RNA, 19 nt, Artificial Sequence
  Synthetic
gcgaaagaugcuagaacaa

SEQ ID NO: 1096 - RNA, 19 nt, Artificial Sequence
  Synthetic
gcugaaaggaggaagagaa

SEQ ID NO: 1097 - RNA, 19 nt, Artificial Sequence
  Synthetic
aggaagaguugcagauuca

SEQ ID NO: 1098 - RNA, 19 nt, Artificial Sequence
  Synthetic
ggaaagauguguucggguu

SEQ ID NO: 1099 - RNA, 19 nt, Artificial Sequence
  Synthetic
ccuaaugaauccuuuguaa

SEQ ID NO: 1100 - RNA, 19 nt, Artificial Sequence
  Synthetic
gcagcaagaggaaaggaaa

SEQ ID NO: 1101 - RNA, 19 nt, Artificial Sequence
  Synthetic
gaaaggaggaagagaagca

SEQ ID NO: 1102 - RNA, 19 nt, Artificial Sequence
  Synthetic
uggagaaguuggugagugu

SEQ ID NO: 1103 - RNA, 19 nt, Artificial Sequence
  Synthetic
cgacaucauuaaugcaaaa

SEQ ID NO: 1104 - RNA, 19 nt, Artificial Sequence
  Synthetic
gaggucaagcugugugaaa

SEQ ID NO: 1105 - RNA, 19 nt, Artificial Sequence
  Synthetic
gguuugagcuggcugaaga

SEQ ID NO: 1106 - RNA, 19 nt, Artificial Sequence
  Synthetic
ggagcugauccuacaguua

SEQ ID NO: 1107 - RNA, 19 nt, Artificial Sequence
  Synthetic
gcacggauguuauauaauu

SEQ ID NO: 1108 - RNA, 19 nt, Artificial Sequence
  Synthetic
gcgacaucauuaaugcaaa

SEQ ID NO: 1109 - RNA, 19 nt, Artificial Sequence
  Synthetic
gccucauucuucugaaaua

SEQ ID NO: 1110 - RNA, 19 nt, Artificial Sequence
  Synthetic
gaaagauguguucggguuu

SEQ ID NO: 1111 - RNA, 19 nt, Artificial Sequence
  Synthetic
ggucaagcugugugaaaau

SEQ ID NO: 1112 - RNA, 19 nt, Artificial Sequence
  Synthetic
gugcacggauguuauauaa

SEQ ID NO: 1113 - RNA, 19 nt, Artificial Sequence
  Synthetic
ucugaauacaggagcgaca

SEQ ID NO: 1114 - RNA, 19 nt, Artificial Sequence
  Synthetic
caucgucuguaaagguuaa

SEQ ID NO: 1115 - RNA, 19 nt, Artificial Sequence
  Synthetic
cagcaagaggaaaggaaag

SEQ ID NO: 1116 - RNA, 19 nt, Artificial Sequence
  Synthetic
ccucauucuucugaaauaa

SEQ ID NO: 1117 - RNA, 19 nt, Artificial Sequence
  Synthetic
ggacucagcuaggauguua

SEQ ID NO: 1118 - RNA, 19 nt, Artificial Sequence
  Synthetic
uccuacaguuaaagacuua

SEQ ID NO: 1119 - RNA, 19 nt, Artificial Sequence
  Synthetic
ugaccagcaucgucuguaa

SEQ ID NO: 1120 - RNA, 19 nt, Artificial Sequence
  Synthetic
caacuuaagaugacuagau

SEQ ID NO: 1121 - RNA, 19 nt, Artificial Sequence
  Synthetic
ccgaauguuccuucagaga

SEQ ID NO: 1122 - RNA, 19 nt, Artificial Sequence
  Synthetic
gaugcuagaacaaggcuau

SEQ ID NO: 1123 - RNA, 19 nt, Artificial Sequence
  Synthetic
augguuuccuguugcgaua

SEQ ID NO: 1124 - RNA, 19 nt, Artificial Sequence
  Synthetic
uacaagaagucacaaguau

SEQ ID NO: 1125 - RNA, 19 nt, Artificial Sequence
  Synthetic
ccacuaugcagcagagaaa

SEQ ID NO: 1126 - RNA, 19 nt, Artificial Sequence
  Synthetic
gguuaacgguccagaagaa

SEQ ID NO: 1127 - RNA, 19 nt, Artificial Sequence
  Synthetic
gggacuuggaacagagaaa

SEQ ID NO: 1128 - RNA, 19 nt, Artificial Sequence
  Synthetic
cuaaauuucucuaggaaga

SEQ ID NO: 1129 - RNA, 19 nt, Artificial Sequence
  Synthetic
uagaauagccggagaagau

SEQ ID NO: 1130 - RNA, 19 nt, Artificial Sequence
  Synthetic
agggaaaucuugagagugu

SEQ ID NO: 1131 - RNA, 19 nt, Artificial Sequence
  Synthetic
gggcagccuuuaagaacaa

SEQ ID NO: 1132 - RNA, 19 nt, Artificial Sequence
  Synthetic
gagcaaaacugucucaaaa

SEQ ID NO: 1133 - RNA, 19 nt, Artificial Sequence
  Synthetic
caacaugucacaacaauaa

SEQ ID NO: 1134 - RNA, 19 nt, Artificial Sequence
  Synthetic
gggcugccaugaagggaaa

SEQ ID NO: 1135 - RNA, 19 nt, Artificial Sequence
  Synthetic
agucaacaguguaacuaaa

SEQ ID NO: 1136 - RNA, 19 nt, Artificial Sequence
  Synthetic
gcgcuuaauccgaacaauu

SEQ ID NO: 1137 - RNA, 19 nt, Artificial Sequence
  Synthetic
cugucaaugcccuggauua

SEQ ID NO: 1138 - RNA, 19 nt, Artificial Sequence
  Synthetic
gaacagagaaagaggacuc

SEQ ID NO: 1139 - RNA, 19 nt, Artificial Sequence
  Synthetic
gaagggaaaucuugagagu

SEQ ID NO: 1140 - RNA, 19 nt, Artificial Sequence
  Synthetic
gagccaagaucgcgccauu

SEQ ID NO: 1141 - RNA, 19 nt, Artificial Sequence
  Synthetic
gcaacaugucacaacaaua

SEQ ID NO: 1142 - RNA, 19 nt, Artificial Sequence
  Synthetic
gggaaggagucaacagugu

SEQ ID NO: 1143 - RNA, 19 nt, Artificial Sequence
  Synthetic
uuggauggcaacagagaua

SEQ ID NO: 1144 - RNA, 19 nt, Artificial Sequence
  Synthetic
guuuauagauuucgaagca

SEQ ID NO: 1145 - RNA, 19 nt, Artificial Sequence
  Synthetic
aggaauaccuguuacuuuu

SEQ ID NO: 1146 - RNA, 19 nt, Artificial Sequence
  Synthetic
uggaguuacuucuggaaaa

SEQ ID NO: 1147 - RNA, 19 nt, Artificial Sequence
  Synthetic
gaagauggaaaguacuuaa

SEQ ID NO: 1148 - RNA, 19 nt, Artificial Sequence
  Synthetic
ggucagagucaucaaccua

SEQ ID NO: 1149 - RNA, 19 nt, Artificial Sequence
  Synthetic
gaaggagucaacaguguaa

SEQ ID NO: 1150 - RNA, 19 nt, Artificial Sequence
  Synthetic
gagcccagccugaccaaua

SEQ ID NO: 1151 - RNA, 19 nt, Artificial Sequence
  Synthetic
cacuuugaauugaggaaaa

SEQ ID NO: 1152 - RNA, 19 nt, Artificial Sequence
  Synthetic
uggagguccuauuggagua

SEQ ID NO: 1153 - RNA, 19 nt, Artificial Sequence
  Synthetic
agacagaagaaucgcuuga

SEQ ID NO: 1154 - RNA, 19 nt, Artificial Sequence
  Synthetic
gagucaacaguguaacuaa

SEQ ID NO: 1155 - RNA, 19 nt, Artificial Sequence
  Synthetic
caagaaugcugaaggcaaa

SEQ ID NO: 1156 - RNA, 19 nt, Artificial Sequence
  Synthetic
ggacgugaaccaagggaaa

SEQ ID NO: 1157 - RNA, 19 nt, Artificial Sequence
  Synthetic
ccaagaaugcugaaggcaa

SEQ ID NO: 1158 - RNA, 19 nt, Artificial Sequence
  Synthetic
ccaugaagcugcuaggaga

SEQ ID NO: 1159 - RNA, 19 nt, Artificial Sequence
  Synthetic
uuaaaugcaucuagggaau

SEQ ID NO: 1160 - RNA, 19 nt, Artificial Sequence
  Synthetic
gcguucaaccugagaguga

SEQ ID NO: 1161 - RNA, 19 nt, Artificial Sequence
  Synthetic
guuuauggaguuugacuaa

SEQ ID NO: 1162 - RNA, 19 nt, Artificial Sequence
  Synthetic
cagcugggauugugugaau

SEQ ID NO: 1163 - RNA, 19 nt, Artificial Sequence
  Synthetic
gggucaagauguccaauuu

SEQ ID NO: 1164 - RNA, 19 nt, Artificial Sequence
  Synthetic
cagcagcaucauaagauaa

SEQ ID NO: 1165 - RNA, 19 nt, Artificial Sequence
  Synthetic
gagcauggaguuuggacuu

SEQ ID NO: 1166 - RNA, 19 nt, Artificial Sequence
  Synthetic
gcacggagccagcguucaa

SEQ ID NO: 1167 - RNA, 19 nt, Artificial Sequence
  Synthetic
ccagcagcaucauaagaua

SEQ ID NO: 1168 - RNA, 19 nt, Artificial Sequence
  Synthetic
ggucaucucucuuguguga

SEQ ID NO: 1169 - RNA, 19 nt, Artificial Sequence
  Synthetic
gcaucaggcuucuuucaaa

SEQ ID NO: 1170 - RNA, 19 nt, Artificial Sequence
  Synthetic
gcauggagcucaggugaau

SEQ ID NO: 1171 - RNA, 19 nt, Artificial Sequence
  Synthetic
agucaggagcggacgugaa

SEQ ID NO: 1172 - RNA, 19 nt, Artificial Sequence
  Synthetic
gugcuuugcugcagaccau

SEQ ID NO: 1173 - RNA, 19 nt, Artificial Sequence
  Synthetic
gaggagucaaauucaaaua

SEQ ID NO: 1174 - RNA, 19 nt, Artificial Sequence
  Synthetic
uagaaggcaugaagacuuu

SEQ ID NO: 1175 - RNA, 19 nt, Artificial Sequence
  Synthetic
acagguagcacucagauua

SEQ ID NO: 1176 - RNA, 19 nt, Artificial Sequence
  Synthetic
ggggcaacauugaccauaa

SEQ ID NO: 1177 - RNA, 19 nt, Artificial Sequence
  Synthetic
ggauagaggagucaaauuc

SEQ ID NO: 1178 - RNA, 19 nt, Artificial Sequence
  Synthetic
gaaguggagcgcagagcuu

SEQ ID NO: 1179 - RNA, 19 nt, Artificial Sequence
  Synthetic
guuguagccacuagaauuu

SEQ ID NO: 1180 - RNA, 19 nt, Artificial Sequence
  Synthetic
uguuguagccacuagaauu

SEQ ID NO: 1181 - RNA, 19 nt, Artificial Sequence
  Synthetic
gcugggauugugugaauuu

SEQ ID NO: 1182 - RNA, 19 nt, Artificial Sequence
  Synthetic
ggagucaaauucaaauaca

SEQ ID NO: 1183 - RNA, 19 nt, Artificial Sequence
  Synthetic
gaauccagcagcaucauaa

SEQ ID NO: 1184 - RNA, 19 nt, Artificial Sequence
  Synthetic
cggacgugaaccaagggaa

SEQ ID NO: 1185 - RNA, 19 nt, Artificial Sequence
  Synthetic
uaacaaacgugcagaaauu

SEQ ID NO: 1186 - RNA, 19 nt, Artificial Sequence
  Synthetic
gaacauggcucaagaaacu

SEQ ID NO: 1187 - RNA, 19 nt, Artificial Sequence
  Synthetic
ggacaaagcaguaccugaa

SEQ ID NO: 1188 - RNA, 19 nt, Artificial Sequence
  Synthetic
gaauaguaguaaugguaga

SEQ ID NO: 1189 - RNA, 19 nt, Artificial Sequence
  Synthetic
gcauuaaucuugcaguuua

SEQ ID NO: 1190 - RNA, 19 nt, Artificial Sequence
  Synthetic
cagaauaguaguaauggua

SEQ ID NO: 1191 - RNA, 19 nt, Artificial Sequence
  Synthetic
cuucaaagacagaauagua

SEQ ID NO: 1192 - RNA, 19 nt, Artificial Sequence
  Synthetic
cugaugagauuguaaguuu

SEQ ID NO: 1193 - RNA, 19 nt, Artificial Sequence
  Synthetic
gaagaaugaucugaaguaa

SEQ ID NO: 1194 - RNA, 19 nt, Artificial Sequence
  Synthetic
agccgaugcugcugagaaa

SEQ ID NO: 1195 - RNA, 19 nt, Artificial Sequence
  Synthetic
gcuguggauuuuauggaaa

SEQ ID NO: 1196 - RNA, 19 nt, Artificial Sequence
  Synthetic
gugcagagggcuuuuauaa

SEQ ID NO: 1197 - RNA, 19 nt, Artificial Sequence
  Synthetic
gcaugucaucggaagaaua

SEQ ID NO: 1198 - RNA, 19 nt, Artificial Sequence
  Synthetic
ugaagaaugaucugaagua

SEQ ID NO: 1199 - RNA, 19 nt, Artificial Sequence
  Synthetic
cugaaguaauugugcugua

SEQ ID NO: 1200 - RNA, 19 nt, Artificial Sequence
  Synthetic
ggaauguagagcaguguau

SEQ ID NO: 1201 - RNA, 19 nt, Artificial Sequence
  Synthetic
caucugaagagcaaagcaa

SEQ ID NO: 1202 - RNA, 19 nt, Artificial Sequence
  Synthetic
gcagccaucugaagagcaa

SEQ ID NO: 1203 - RNA, 19 nt, Artificial Sequence
  Synthetic
gugaaaagauccaaaagau

SEQ ID NO: 1204 - RNA, 19 nt, Artificial Sequence
  Synthetic
gcaggaagaaagugggacu

SEQ ID NO: 1205 - RNA, 19 nt, Artificial Sequence
  Synthetic
gcagagggcuuuuauaaca

SEQ ID NO: 1206 - RNA, 19 nt, Artificial Sequence
  Synthetic
uugaacuccugcuggaaua

SEQ ID NO: 1207 - RNA, 19 nt, Artificial Sequence
  Synthetic
agugugugcugaugagauu

SEQ ID NO: 1208 - RNA, 19 nt, Artificial Sequence
  Synthetic
uggaaacccucguacaaau

SEQ ID NO: 1209 - RNA, 19 nt, Artificial Sequence
  Synthetic
gagaauagggaaggcagaa

SEQ ID NO: 1210 - RNA, 19 nt, Artificial Sequence
  Synthetic
agacagaauaguaguaaug

SEQ ID NO: 1211 - RNA, 19 nt, Artificial Sequence
  Synthetic
caaagacagaauaguagua

SEQ ID NO: 1212 - RNA, 19 nt, Artificial Sequence
  Synthetic
cacaacuaguuaucaguaa

SEQ ID NO: 1213 - RNA, 19 nt, Artificial Sequence
  Synthetic
caguacaucuguggacaaa

SEQ ID NO: 1214 - RNA, 19 nt, Artificial Sequence
  Synthetic
agaauaagcccaccugcaa

SEQ ID NO: 1215 - RNA, 19 nt, Artificial Sequence
  Synthetic
gaacaaagcuuuucugaua

SEQ ID NO: 1216 - RNA, 19 nt, Artificial Sequence
  Synthetic
uggaagaaauacaggaaua

SEQ ID NO: 1217 - RNA, 19 nt, Artificial Sequence
  Synthetic
gaacagacuuaaugagaga

SEQ ID NO: 1218 - RNA, 19 nt, Artificial Sequence
  Synthetic
gcucaagguggaagaaaua

SEQ ID NO: 1219 - RNA, 19 nt, Artificial Sequence
  Synthetic
aagagaaguuggagcuuaa

SEQ ID NO: 1220 - RNA, 19 nt, Artificial Sequence
  Synthetic
acauagagcucaugcaaau

SEQ ID NO: 1221 - RNA, 19 nt, Artificial Sequence
  Synthetic
agaagaagaaggugacuua

SEQ ID NO: 1222 - RNA, 19 nt, Artificial Sequence
  Synthetic
auacuaaguucuagggauu

SEQ ID NO: 1223 - RNA, 19 nt, Artificial Sequence
  Synthetic
cagaagaagaagaagguga

SEQ ID NO: 1224 - RNA, 19 nt, Artificial Sequence
  Synthetic
ugggagaaauguuggaaau

SEQ ID NO: 1225 - RNA, 19 nt, Artificial Sequence
  Synthetic
ccaagaaucugaagguaga

SEQ ID NO: 1226 - RNA, 19 nt, Artificial Sequence
  Synthetic
gaauucagcugaugguaaa

SEQ ID NO: 1227 - RNA, 19 nt, Artificial Sequence
  Synthetic
ccaccaagacuguaugaaa

SEQ ID NO: 1228 - RNA, 19 nt, Artificial Sequence
  Synthetic
ccagaaagauugcagaaaa

SEQ ID NO: 1229 - RNA, 19 nt, Artificial Sequence
  Synthetic
cgaagaagacggagaccau

SEQ ID NO: 1230 - RNA, 19 nt, Artificial Sequence
  Synthetic
cagaaagauugcagaaaau

SEQ ID NO: 1231 - RNA, 19 nt, Artificial Sequence
  Synthetic
caagagauccagaaagauu

SEQ ID NO: 1232 - RNA, 19 nt, Artificial Sequence
  Synthetic
gaaucugaagguagaaaua

SEQ ID NO: 1233 - RNA, 19 nt, Artificial Sequence
  Synthetic
ggaauucagcugaugguaa

SEQ ID NO: 1234 - RNA, 19 nt, Artificial Sequence
  Synthetic
ggagagauuuggagagaag

SEQ ID NO: 1235 - RNA, 19 nt, Artificial Sequence
  Synthetic
gggaguaauuugaccgaca

SEQ ID NO: 1236 - RNA, 19 nt, Artificial Sequence
  Synthetic
gagcaagaccaaaagaaaa

SEQ ID NO: 1237 - RNA, 19 nt, Artificial Sequence
  Synthetic
gcgagagggaagagaugaa

SEQ ID NO: 1238 - RNA, 19 nt, Artificial Sequence
  Synthetic
aagcagaggaaguaguuua

SEQ ID NO: 1239 - RNA, 19 nt, Artificial Sequence
  Synthetic
gauucaucuuggaggcaua

SEQ ID NO: 1240 - RNA, 19 nt, Artificial Sequence
  Synthetic
ggcucaagguggaagaaau

SEQ ID NO: 1241 - RNA, 19 nt, Artificial Sequence
  Synthetic
ggaaaugguuuaaacacau

SEQ ID NO: 1242 - RNA, 19 nt, Artificial Sequence
  Synthetic
gggaaauacaaaugaacca

SEQ ID NO: 1243 - RNA, 19 nt, Artificial Sequence
  Synthetic
ggacucagaagaagaagaa

SEQ ID NO: 1244 - RNA, 19 nt, Artificial Sequence
  Synthetic
ucucgaaacuucagaggau

SEQ ID NO: 1245 - RNA, 19 nt, Artificial Sequence
  Synthetic
ggcccaaggucaauggcaa

SEQ ID NO: 1246 - RNA, 19 nt, Artificial Sequence
  Synthetic
ccaaaguggcccaagguca

SEQ ID NO: 1247 - RNA, 19 nt, Artificial Sequence
  Synthetic
ggaccuuggaggaggaagu

SEQ ID NO: 1248 - RNA, 19 nt, Artificial Sequence
  Synthetic
uggccugcauugaggagaa

SEQ ID NO: 1249 - RNA, 19 nt, Artificial Sequence
  Synthetic
aggucaauggcaagaacua

SEQ ID NO: 1250 - RNA, 19 nt, Artificial Sequence
  Synthetic
gaguaaagcuucagugcaa

SEQ ID NO: 1251 - RNA, 19 nt, Artificial Sequence
  Synthetic
ucagauauguugugaguaa

SEQ ID NO: 1252 - RNA, 19 nt, Artificial Sequence
  Synthetic
acaaauagguagagucauu

SEQ ID NO: 1253 - RNA, 19 nt, Artificial Sequence
  Synthetic
gaagauaaaccuaggaaaa

SEQ ID NO: 1254 - RNA, 19 nt, Artificial Sequence
  Synthetic
caguaauucuuaaggcuaa

SEQ ID NO: 1255 - RNA, 19 nt, Artificial Sequence
  Synthetic
acguaaaguuggugguaca

SEQ ID NO: 1256 - RNA, 19 nt, Artificial Sequence
  Synthetic
cgacauaccuucuguugaa

SEQ ID NO: 1257 - RNA, 19 nt, Artificial Sequence
  Synthetic
gaaguaagaaagucagaua

SEQ ID NO: 1258 - RNA, 19 nt, Artificial Sequence
  Synthetic
guacuaacauucugagaga

SEQ ID NO: 1259 - RNA, 19 nt, Artificial Sequence
  Synthetic
gcaggaaacaagaagaauu

SEQ ID NO: 1260 - RNA, 19 nt, Artificial Sequence
  Synthetic
caaugaagcuguugcccaa

SEQ ID NO: 1261 - RNA, 19 nt, Artificial Sequence
  Synthetic
cagcaagacucauaugaau

SEQ ID NO: 1262 - RNA, 19 nt, Artificial Sequence
  Synthetic
gaaauuugcuacaugacaa

SEQ ID NO: 1263 - RNA, 19 nt, Artificial Sequence
  Synthetic
caaaguaccuugaagugua

SEQ ID NO: 1264 - RNA, 19 nt, Artificial Sequence
  Synthetic
ccagaaaugcuguuaauau

SEQ ID NO: 1265 - RNA, 19 nt, Artificial Sequence
  Synthetic
gaaauagacuuacuagcaa

SEQ ID NO: 1266 - RNA, 19 nt, Artificial Sequence
  Synthetic
ggaaacaagaagaauucaa

SEQ ID NO: 1267 - RNA, 19 nt, Artificial Sequence
  Synthetic
guagaaagcccaagccaga

SEQ ID NO: 1268 - RNA, 19 nt, Artificial Sequence
  Synthetic
ugagagagccuguguguuu

SEQ ID NO: 1269 - RNA, 19 nt, Artificial Sequence
  Synthetic
gaguuugacaguacaguaa

SEQ ID NO: 1270 - RNA, 19 nt, Artificial Sequence
  Synthetic
ggaagugauccaaauguua

SEQ ID NO: 1271 - RNA, 19 nt, Artificial Sequence
  Synthetic
aaagaggaaucuaagcaaa

SEQ ID NO: 1272 - RNA, 19 nt, Artificial Sequence
  Synthetic
agaagauaaaccuaggaaa

SEQ ID NO: 1273 - RNA, 19 nt, Artificial Sequence
  Synthetic
ccucgaaguaagaaaguca

SEQ ID NO: 1274 - RNA, 19 nt, Artificial Sequence
  Synthetic
uguaguaagcuucgaaauu

SEQ ID NO: 1275 - RNA, 19 nt, Artificial Sequence
  Synthetic
ugucagauuugaaagaaga

SEQ ID NO: 1276 - RNA, 19 nt, Artificial Sequence
  Synthetic
cuucagaacaacagaaaau

SEQ ID NO: 1277 - RNA, 19 nt, Artificial Sequence
  Synthetic
gagcacaucuucuguagua

SEQ ID NO: 1278 - RNA, 19 nt, Artificial Sequence
  Synthetic
gcaguaauucuuaaggcua

SEQ ID NO: 1279 - RNA, 19 nt, Artificial Sequence
  Synthetic
cgauuauacagaugaugaa

SEQ ID NO: 1280 - RNA, 19 nt, Artificial Sequence
  Synthetic
caaagaacgaagagagaaa

SEQ ID NO: 1281 - RNA, 19 nt, Artificial Sequence
  Synthetic
aagaaaugcuugagagauu

SEQ ID NO: 1282 - RNA, 19 nt, Artificial Sequence
  Synthetic
ggaaagaaauggaagccaa

SEQ ID NO: 1283 - RNA, 19 nt, Artificial Sequence
  Synthetic
aaacagaaacggaaagaaa

SEQ ID NO: 1284 - RNA, 19 nt, Artificial Sequence
  Synthetic
agaugaaguuccaggauua

SEQ ID NO: 1285 - RNA, 19 nt, Artificial Sequence
  Synthetic
ggaagaaacaucagaauuu

SEQ ID NO: 1286 - RNA, 19 nt, Artificial Sequence
  Synthetic
ccaaauaugcugugggaga

SEQ ID NO: 1287 - RNA, 19 nt, Artificial Sequence
  Synthetic
gaacgaagagagaaagaaa

SEQ ID NO: 1288 - RNA, 19 nt, Artificial Sequence
  Synthetic
gugaagaacucaaagaauu

SEQ ID NO: 1289 - RNA, 19 nt, Artificial Sequence
  Synthetic
gagaugaggccgaggacua

SEQ ID NO: 1290 - RNA, 19 nt, Artificial Sequence
  Synthetic
gcuaagaaggaacgggaaa

SEQ ID NO: 1291 - RNA, 19 nt, Artificial Sequence
  Synthetic
ccaauaagcugcacacuaa

SEQ ID NO: 1292 - RNA, 19 nt, Artificial Sequence
  Synthetic
ccucagggaauaagagaaa

SEQ ID NO: 1293 - RNA, 19 nt, Artificial Sequence
  Synthetic
gaaagaaaggugaggauga

SEQ ID NO: 1294 - RNA, 19 nt, Artificial Sequence
  Synthetic
ggaaggagagagaguauua

SEQ ID NO: 1295 - RNA, 19 nt, Artificial Sequence
  Synthetic
gggaauaagagaaagucaa

SEQ ID NO: 1296 - RNA, 19 nt, Artificial Sequence
  Synthetic
aggcaaaacugauaggaaa

SEQ ID NO: 1297 - RNA, 19 nt, Artificial Sequence
  Synthetic
gagaaauggaagacagcaa

SEQ ID NO: 1298 - RNA, 19 nt, Artificial Sequence
  Synthetic
ugaagaacaucuagaagaa

SEQ ID NO: 1299 - RNA, 19 nt, Artificial Sequence
  Synthetic
acgccaagcugaagaagaa

SEQ ID NO: 1300 - RNA, 19 nt, Artificial Sequence
  Synthetic
ggagauaguucgauacuuu

SEQ ID NO: 1301 - RNA, 19 nt, Artificial Sequence
  Synthetic
cagcagugauauuguauaa

SEQ ID NO: 1302 - RNA, 19 nt, Artificial Sequence
  Synthetic
uaagaagagagcagagaaa

SEQ ID NO: 1303 - RNA, 19 nt, Artificial Sequence
  Synthetic
gugaagaugaugagaguga

SEQ ID NO: 1304 - RNA, 19 nt, Artificial Sequence
  Synthetic
gaaagaaaugcuugagaga

SEQ ID NO: 1305 - RNA, 19 nt, Artificial Sequence
  Synthetic
aagaugaauuggugaagaa

SEQ ID NO: 1306 - RNA, 19 nt, Artificial Sequence
  Synthetic
agaaguugcuguagagaca

SEQ ID NO: 1307 - RNA, 19 nt, Artificial Sequence
  Synthetic
gaaagcaaacuuagguaaa

SEQ ID NO: 1308 - RNA, 19 nt, Artificial Sequence
  Synthetic
ggcaaagggcagaagcaaa

SEQ ID NO: 1309 - RNA, 19 nt, Artificial Sequence
  Synthetic
gaugaaggaaggagagaga

SEQ ID NO: 1310 - RNA, 19 nt, Artificial Sequence
  Synthetic
ccaaguaacucgagauauu

SEQ ID NO: 1311 - RNA, 19 nt, Artificial Sequence
  Synthetic
agaagaagaugaagaagaa

SEQ ID NO: 1312 - RNA, 19 nt, Artificial Sequence
  Synthetic
ggaagaugaugaagaagaa

SEQ ID NO: 1313 - RNA, 19 nt, Artificial Sequence
  Synthetic
ggagaguggugaaggacua

SEQ ID NO: 1314 - RNA, 19 nt, Artificial Sequence
  Synthetic
gauaagaaaccaaggaaga

SEQ ID NO: 1315 - RNA, 19 nt, Artificial Sequence
  Synthetic
ugaaagaagaauugaggaa

SEQ ID NO: 1316 - RNA, 19 nt, Artificial Sequence
  Synthetic
acugcaagcucaagaaaua

SEQ ID NO: 1317 - RNA, 19 nt, Artificial Sequence
  Synthetic
aagaaaggcaagaagguaa

SEQ ID NO: 1318 - RNA, 19 nt, Artificial Sequence
  Synthetic
gggccuaaauuaaaguaua

SEQ ID NO: 1319 - RNA, 19 nt, Artificial Sequence
  Synthetic
gugaaggacuagaagaaau

SEQ ID NO: 1320 - RNA, 19 nt, Artificial Sequence
  Synthetic
cagcaaaucagaauggaaa

SEQ ID NO: 1321 - RNA, 19 nt, Artificial Sequence
  Synthetic
gaggagaagcggaagcaaa

SEQ ID NO: 1322 - RNA, 19 nt, Artificial Sequence
  Synthetic
gcacauacauaaugacuuu

SEQ ID NO: 1323 - RNA, 19 nt, Artificial Sequence
  Synthetic
gcagcgaagauuagaauua

SEQ ID NO: 1324 - RNA, 19 nt, Artificial Sequence
  Synthetic
aaagaagaauugaggaaga

SEQ ID NO: 1325 - RNA, 19 nt, Artificial Sequence
  Synthetic
cagaaaguguccagaucaa

SEQ ID NO: 1326 - RNA, 19 nt, Artificial Sequence
  Synthetic
ggacagaaagcaacugaaa

SEQ ID NO: 1327 - RNA, 19 nt, Artificial Sequence
  Synthetic
cagcaugggugaaguacaa

SEQ ID NO: 1328 - RNA, 19 nt, Artificial Sequence
  Synthetic
ggaugaagaugaugaggau

SEQ ID NO: 1329 - RNA, 19 nt, Artificial Sequence
  Synthetic
aaacaaagaccuccagaaa

SEQ ID NO: 1330 - RNA, 19 nt, Artificial Sequence
  Synthetic
cagagagagacaagaauaa

SEQ ID NO: 1331 - RNA, 19 nt, Artificial Sequence
  Synthetic
ugauaaagaccaagaugaa

SEQ ID NO: 1332 - RNA, 19 nt, Artificial Sequence
  Synthetic
cgacaagaacauugauuau

SEQ ID NO: 1333 - RNA, 19 nt, Artificial Sequence
  Synthetic
ggagcaugauggagaauuu

SEQ ID NO: 1334 - RNA, 19 nt, Artificial Sequence
  Synthetic
ggugaaagguggaguaucu

SEQ ID NO: 1335 - RNA, 19 nt, Artificial Sequence
  Synthetic
ggaacaauucagaggaaca

SEQ ID NO: 1336 - RNA, 19 nt, Artificial Sequence
  Synthetic
ggaaggucguagaggaaga

SEQ ID NO: 1337 - RNA, 19 nt, Artificial Sequence
  Synthetic
gagaaaaggcauuacaaaa

SEQ ID NO: 1338 - RNA, 19 nt, Artificial Sequence
  Synthetic
gcugaauguuggugugaau

SEQ ID NO: 1339 - RNA, 19 nt, Artificial Sequence
  Synthetic
cgagaaacgaauaaaggaa

SEQ ID NO: 1340 - RNA, 19 nt, Artificial Sequence
  Synthetic
agccaaaggaauugaguaa

SEQ ID NO: 1341 - RNA, 19 nt, Artificial Sequence
  Synthetic
cuucaaugacagagaggaa

SEQ ID NO: 1342 - RNA, 19 nt, Artificial Sequence
  Synthetic
agaaauugaaagaggguca

SEQ ID NO: 1343 - RNA, 19 nt, Artificial Sequence
  Synthetic
cuggaaagaaauugaaaga

SEQ ID NO: 1344 - RNA, 19 nt, Artificial Sequence
  Synthetic
aggcauacaaacagaagaa

SEQ ID NO: 1345 - RNA, 19 nt, Artificial Sequence
  Synthetic
gaccagaaauguauggcua

SEQ ID NO: 1346 - RNA, 19 nt, Artificial Sequence
  Synthetic
cugaauuacuacaggagau

SEQ ID NO: 1347 - RNA, 19 nt, Artificial Sequence
  Synthetic
gcauacaaacagaagaaca

SEQ ID NO: 1348 - RNA, 19 nt, Artificial Sequence
  Synthetic
ggaaagaaauugaaagagg

SEQ ID NO: 1349 - RNA, 19 nt, Artificial Sequence
  Synthetic
ggagagaguuccuggucaa

SEQ ID NO: 1350 - RNA, 19 nt, Artificial Sequence
  Synthetic
caauggaccuugagagaga

SEQ ID NO: 1351 - RNA, 19 nt, Artificial Sequence
  Synthetic
uguccagaaugcagagaaa

SEQ ID NO: 1352 - RNA, 19 nt, Artificial Sequence
  Synthetic
gagccuagaaugaugguua

SEQ ID NO: 1353 - RNA, 19 nt, Artificial Sequence
  Synthetic
gagaguuccuggucaaaua

SEQ ID NO: 1354 - RNA, 19 nt, Artificial Sequence
  Synthetic
aggauaagauucugucaua

SEQ ID NO: 1355 - RNA, 19 nt, Artificial Sequence
  Synthetic
ccaaauggacggcggaaga

SEQ ID NO: 1356 - RNA, 19 nt, Artificial Sequence
  Synthetic
gaauaaugacauaguccaa

SEQ ID NO: 1357 - RNA, 19 nt, Artificial Sequence
  Synthetic
gcuacgacauccugguuaa

SEQ ID NO: 1358 - RNA, 19 nt, Artificial Sequence
  Synthetic
uugcuaggauucagaguaa

SEQ ID NO: 1359 - RNA, 19 nt, Artificial Sequence
  Synthetic
uaacacaggccgagcgaau

SEQ ID NO: 1360 - RNA, 19 nt, Artificial Sequence
  Synthetic
auagagaguugcacauaaa

SEQ ID NO: 1361 - RNA, 19 nt, Artificial Sequence
  Synthetic
ggagcuagaacgugucaaa

SEQ ID NO: 1362 - RNA, 19 nt, Artificial Sequence
  Synthetic
gcaucucuuuacagggaaa

SEQ ID NO: 1363 - RNA, 19 nt, Artificial Sequence
  Synthetic
gggaggacaucgucaccaa

SEQ ID NO: 1364 - RNA, 19 nt, Artificial Sequence
  Synthetic
uggagaaucuggucgagaa

SEQ ID NO: 1365 - RNA, 19 nt, Artificial Sequence
  Synthetic
cagaggauguggagccauu

SEQ ID NO: 1366 - RNA, 19 nt, Artificial Sequence
  Synthetic
cauagagaguugcacauaa

SEQ ID NO: 1367 - RNA, 19 nt, Artificial Sequence
  Synthetic
ggacgaguggaaugauuaa

SEQ ID NO: 1368 - RNA, 19 nt, Artificial Sequence
  Synthetic
gggacgaguggaaugauua

SEQ ID NO: 1369 - RNA, 19 nt, Artificial Sequence
  Synthetic
uugaagaguugcuaggauu

SEQ ID NO: 1370 - RNA, 19 nt, Artificial Sequence
  Synthetic
ggaccuugagagagaugaa

SEQ ID NO: 1371 - RNA, 19 nt, Artificial Sequence
  Synthetic
uggaagcaguggagagagu

SEQ ID NO: 1372 - RNA, 19 nt, Artificial Sequence
  Synthetic
cacaauggaccuugagaga

SEQ ID NO: 1373 - RNA, 19 nt, Artificial Sequence
  Synthetic
acugagauuugaagacauu

SEQ ID NO: 1374 - RNA, 19 nt, Artificial Sequence
  Synthetic
gggaauauaaggcugugaa

SEQ ID NO: 1375 - RNA, 19 nt, Artificial Sequence
  Synthetic
uaacuuugacagaggaaga

SEQ ID NO: 1376 - RNA, 19 nt, Artificial Sequence
  Synthetic
agaacgugucaaagcauua

SEQ ID NO: 1377 - RNA, 19 nt, Artificial Sequence
  Synthetic
caucaucaaugcuauguua

SEQ ID NO: 1378 - RNA, 19 nt, Artificial Sequence
  Synthetic
gggcaguucccauuagauu

SEQ ID NO: 1379 - RNA, 19 nt, Artificial Sequence
  Synthetic
cggaagaaccugauaguaa

SEQ ID NO: 1380 - RNA, 19 nt, Artificial Sequence
  Synthetic
gcaagaggcaagagcgaaa

SEQ ID NO: 1381 - RNA, 19 nt, Artificial Sequence
  Synthetic
ggaagaaccugauaguaaa

SEQ ID NO: 1382 - RNA, 19 nt, Artificial Sequence
  Synthetic
gaagagagccaaugaggaa

SEQ ID NO: 1383 - RNA, 19 nt, Artificial Sequence
  Synthetic
gagaacaacuagagcaaaa

SEQ ID NO: 1384 - RNA, 19 nt, Artificial Sequence
  Synthetic
uagaagaaauccaaagcaa

SEQ ID NO: 1385 - RNA, 19 nt, Artificial Sequence
  Synthetic
caaaagaagaagagaaaca

SEQ ID NO: 1386 - RNA, 19 nt, Artificial Sequence
  Synthetic
cacagaaacagaugagaaa

SEQ ID NO: 1387 - RNA, 19 nt, Artificial Sequence
  Synthetic
gagaggaggaggaggauga

SEQ ID NO: 1388 - RNA, 19 nt, Artificial Sequence
  Synthetic
gggcagaggcuguccaaau

SEQ ID NO: 1389 - RNA, 19 nt, Artificial Sequence
  Synthetic
cagaaacagaugagaaaca

SEQ ID NO: 1390 - RNA, 19 nt, Artificial Sequence
  Synthetic
gauaguaaagcaagaacaa

SEQ ID NO: 1391 - RNA, 19 nt, Artificial Sequence
  Synthetic
gaagaaauccaaagcaaga

SEQ ID NO: 1392 - RNA, 19 nt, Artificial Sequence
  Synthetic
caucaaaguaccacaguuu

SEQ ID NO: 1393 - RNA, 19 nt, Artificial Sequence
  Synthetic
guaaaugcauggaaaugaa

SEQ ID NO: 1394 - RNA, 19 nt, Artificial Sequence
  Synthetic
aagaagaacaacagcaaau

SEQ ID NO: 1395 - RNA, 19 nt, Artificial Sequence
  Synthetic
gagaagaucuugagugaag

SEQ ID NO: 1396 - RNA, 19 nt, Artificial Sequence
  Synthetic
acacagaaacagaugagaa

SEQ ID NO: 1397 - RNA, 19 nt, Artificial Sequence
  Synthetic
cagcaauuccauaaguaaa

SEQ ID NO: 1398 - RNA, 19 nt, Artificial Sequence
  Synthetic
agcaaaagaagaagagaaa

SEQ ID NO: 1399 - RNA, 19 nt, Artificial Sequence
  Synthetic
cagcaaaagaagaagagaa

SEQ ID NO: 1400 - RNA, 19 nt, Artificial Sequence
  Synthetic
ggaagaaggaugugugugu

SEQ ID NO: 1401 - RNA, 19 nt, Artificial Sequence
  Synthetic
cagagaaaguggagaaggu

SEQ ID NO: 1402 - RNA, 19 nt, Artificial Sequence
  Synthetic
guuaaaucucacacagaaa

SEQ ID NO: 1403 - RNA, 19 nt, Artificial Sequence
  Synthetic
acgagaacaacuagagcaa

SEQ ID NO: 1404 - RNA, 19 nt, Artificial Sequence
  Synthetic
gggaagagacuaaauaaca

SEQ ID NO: 1405 - RNA, 19 nt, Artificial Sequence
  Synthetic
ucuuugagccagagcguaa

SEQ ID NO: 1406 - RNA, 19 nt, Artificial Sequence
  Synthetic
caccaugccaagugaaaua

SEQ ID NO: 1407 - RNA, 19 nt, Artificial Sequence
  Synthetic
gaagaaggaagaagcaauu

SEQ ID NO: 1408 - RNA, 19 nt, Artificial Sequence
  Synthetic
agaagagugcagugacaua

SEQ ID NO: 1409 - RNA, 19 nt, Artificial Sequence
  Synthetic
ggaaggagaaaguggaaau

SEQ ID NO: 1410 - RNA, 19 nt, Artificial Sequence
  Synthetic
cuaugaagccggugaaauu

SEQ ID NO: 1411 - RNA, 19 nt, Artificial Sequence
  Synthetic
ggagggagcucuuaaggaa

SEQ ID NO: 1412 - RNA, 19 nt, Artificial Sequence
  Synthetic
ccaacaacccugagcgauu

SEQ ID NO: 1413 - RNA, 19 nt, Artificial Sequence
  Synthetic
gggagguucuggugggaga

SEQ ID NO: 1414 - RNA, 19 nt, Artificial Sequence
  Synthetic
ugaaggagcuggcggauga

SEQ ID NO: 1415 - RNA, 19 nt, Artificial Sequence
  Synthetic
ucacaaggcuggaagcaga

SEQ ID NO: 1416 - RNA, 19 nt, Artificial Sequence
  Synthetic
gauuggaguuugagaagca

SEQ ID NO: 1417 - RNA, 19 nt, Artificial Sequence
  Synthetic
ggaaagaguuggaggacgc

SEQ ID NO: 1418 - RNA, 19 nt, Artificial Sequence
  Synthetic
gaucacaagcucaggaguu

SEQ ID NO: 1419 - RNA, 19 nt, Artificial Sequence
  Synthetic
ggaaaguccucgcugcauu

SEQ ID NO: 1420 - RNA, 19 nt, Artificial Sequence
  Synthetic
agacauggcaauucuuaaa

SEQ ID NO: 1421 - RNA, 19 nt, Artificial Sequence
  Synthetic
aggagaaaguggaaaugca

SEQ ID NO: 1422 - RNA, 19 nt, Artificial Sequence
  Synthetic
caaaagagggaauaugaaa

SEQ ID NO: 1423 - RNA, 19 nt, Artificial Sequence
  Synthetic
gcugaaagggaaugaguac

SEQ ID NO: 1424 - RNA, 19 nt, Artificial Sequence
  Synthetic
ggcuggaagcagagaacau

SEQ ID NO: 1425 - RNA, 19 nt, Artificial Sequence
  Synthetic
ugaaagggaaugaguacau

SEQ ID NO: 1426 - RNA, 19 nt, Artificial Sequence
  Synthetic
agagacugcgggagagcaa

SEQ ID NO: 1427 - RNA, 19 nt, Artificial Sequence
  Synthetic
gcuucagauuggaguuuga

SEQ ID NO: 1428 - RNA, 19 nt, Artificial Sequence
  Synthetic
cucuggaacuuaugaggaa

SEQ ID NO: 1429 - RNA, 19 nt, Artificial Sequence
  Synthetic
gaacuuaugaggaaagagu

SEQ ID NO: 1430 - RNA, 19 nt, Artificial Sequence
  Synthetic
ggaguggggugaaggauau

SEQ ID NO: 1431 - RNA, 19 nt, Artificial Sequence
  Synthetic
guugcuuccuucuggauua

SEQ ID NO: 1432 - RNA, 19 nt, Artificial Sequence
  Synthetic
ucacuaacuccuagacuuu

SEQ ID NO: 1433 - RNA, 19 nt, Artificial Sequence
  Synthetic
ggacuaugaagccggugaa

SEQ ID NO: 1434 - RNA, 19 nt, Artificial Sequence
  Synthetic
gcggaugagcugcaggaga

SEQ ID NO: 1435 - RNA, 19 nt, Artificial Sequence
  Synthetic
ggagcaaucucaaccucua

SEQ ID NO: 1436 - RNA, 19 nt, Artificial Sequence
  Synthetic
gggucaggaaauugggcau

SEQ ID NO: 1437 - RNA, 19 nt, Artificial Sequence
  Synthetic
cggaugagcugcaggagag

SEQ ID NO: 1438 - RNA, 19 nt, Artificial Sequence
  Synthetic
cuacaaugucacagaugga

SEQ ID NO: 1439 - RNA, 19 nt, Artificial Sequence
  Synthetic
acaaauagcacuuagguua

SEQ ID NO: 1440 - RNA, 19 nt, Artificial Sequence
  Synthetic
gagaagaggagaaggaaaa

SEQ ID NO: 1441 - RNA, 19 nt, Artificial Sequence
  Synthetic
ccauuuugguuaaaggaaa

SEQ ID NO: 1442 - RNA, 19 nt, Artificial Sequence
  Synthetic
agagaagaggagaaggaaa

SEQ ID NO: 1443 - RNA, 19 nt, Artificial Sequence
  Synthetic
cuucauagcuuguaaccaa

SEQ ID NO: 1444 - RNA, 19 nt, Artificial Sequence
  Synthetic
ucuaaaugcugaagaugaa

SEQ ID NO: 1445 - RNA, 19 nt, Artificial Sequence
  Synthetic
aaugaaaggccaagaguuu

SEQ ID NO: 1446 - RNA, 19 nt, Artificial Sequence
  Synthetic
uaaagugcuuauagggaaa

SEQ ID NO: 1447 - RNA, 19 nt, Artificial Sequence
  Synthetic
gaaagaagccugcauauaa

SEQ ID NO: 1448 - RNA, 19 nt, Artificial Sequence
  Synthetic
ggaaaugggcuuuaauaga

SEQ ID NO: 1449 - RNA, 19 nt, Artificial Sequence
  Synthetic
ggaagaaagucaacaugau

SEQ ID NO: 1450 - RNA, 19 nt, Artificial Sequence
  Synthetic
ggauccaccucuaagaaua

SEQ ID NO: 1451 - RNA, 19 nt, Artificial Sequence
  Synthetic
ggcuugagguguugggaau

SEQ ID NO: 1452 - RNA, 19 nt, Artificial Sequence
  Synthetic
ggaaagaagccugcauaua

SEQ ID NO: 1453 - RNA, 19 nt, Artificial Sequence
  Synthetic
ucgcaaugaugaugucaaa

SEQ ID NO: 1454 - RNA, 19 nt, Artificial Sequence
  Synthetic
auagagaccuggugaaaca

SEQ ID NO: 1455 - RNA, 19 nt, Artificial Sequence
  Synthetic
cagaaagcuuugaauacua

SEQ ID NO: 1456 - RNA, 19 nt, Artificial Sequence
  Synthetic
ggacaaacagcaacaaaca

SEQ ID NO: 1457 - RNA, 19 nt, Artificial Sequence
  Synthetic
acucugagguuuagcauuu

SEQ ID NO: 1458 - RNA, 19 nt, Artificial Sequence
  Synthetic
guaaaguguguauggacaa

SEQ ID NO: 1459 - RNA, 19 nt, Artificial Sequence
  Synthetic
caggaaauggaaacaaaua

SEQ ID NO: 1460 - RNA, 19 nt, Artificial Sequence
  Synthetic
cugaauaguccuuaaauga

SEQ ID NO: 1461 - RNA, 19 nt, Artificial Sequence
  Synthetic
gcgagagaacugauugaua

SEQ ID NO: 1462 - RNA, 19 nt, Artificial Sequence
  Synthetic
acaaacagcaacaaacaaa

SEQ ID NO: 1463 - RNA, 19 nt, Artificial Sequence
  Synthetic
gccaagaguuuguugauga

SEQ ID NO: 1464 - RNA, 19 nt, Artificial Sequence
  Synthetic
cauccuaccugaauauaaa

SEQ ID NO: 1465 - RNA, 19 nt, Artificial Sequence
  Synthetic
cugaaaagaugguaucaua

SEQ ID NO: 1466 - RNA, 19 nt, Artificial Sequence
  Synthetic
gggcuuuaaguuaguauua

SEQ ID NO: 1467 - RNA, 19 nt, Artificial Sequence
  Synthetic
agauaccacuggagaagaa

SEQ ID NO: 1468 - RNA, 19 nt, Artificial Sequence
  Synthetic
aaagagaagaggagaagga

SEQ ID NO: 1469 - RNA, 19 nt, Artificial Sequence
  Synthetic
agaaagagcaacugaggaa

SEQ ID NO: 1470 - RNA, 19 nt, Artificial Sequence
  Synthetic
agucaaugaucuuguguua

SEQ ID NO: 1471 - RNA, 19 nt, Artificial Sequence
  Synthetic
agggaagaggagagagaaa

SEQ ID NO: 1472 - RNA, 19 nt, Artificial Sequence
  Synthetic
ccuguaaacuccagagcaa

SEQ ID NO: 1473 - RNA, 19 nt, Artificial Sequence
  Synthetic
ggacucagguguugggaau

SEQ ID NO: 1474 - RNA, 19 nt, Artificial Sequence
  Synthetic
ccuagcaacuggagagaau

SEQ ID NO: 1475 - RNA, 19 nt, Artificial Sequence
  Synthetic
gcauauauguugaaugaca

SEQ ID NO: 1476 - RNA, 19 nt, Artificial Sequence
  Synthetic
gugcauauauguugaauga

SEQ ID NO: 1477 - RNA, 19 nt, Artificial Sequence
  Synthetic
gaaaugggcuuuaguagaa

SEQ ID NO: 1478 - RNA, 19 nt, Artificial Sequence
  Synthetic
ggaagaggagagagaaaga

SEQ ID NO: 1479 - RNA, 19 nt, Artificial Sequence
  Synthetic
caacauuugacuuguguaa

SEQ ID NO: 1480 - RNA, 19 nt, Artificial Sequence
  Synthetic
caucuuagaaucagugaaa

SEQ ID NO: 1481 - RNA, 19 nt, Artificial Sequence
  Synthetic
gaggagagagaaagagcaa

SEQ ID NO: 1482 - RNA, 19 nt, Artificial Sequence
  Synthetic
gcaagagaacugauugaua

SEQ ID NO: 1483 - RNA, 19 nt, Artificial Sequence
  Synthetic
gaugaauacuccugugauu

SEQ ID NO: 1484 - RNA, 19 nt, Artificial Sequence
  Synthetic
ggaaaugggcuuuaguaga

SEQ ID NO: 1485 - RNA, 19 nt, Artificial Sequence
  Synthetic
gcggagacuacaagaagaa

SEQ ID NO: 1486 - RNA, 19 nt, Artificial Sequence
  Synthetic
cauaggaccuggagacaga

SEQ ID NO: 1487 - RNA, 19 nt, Artificial Sequence
  Synthetic
gauuaaugcugccguggaa

SEQ ID NO: 1488 - RNA, 19 nt, Artificial Sequence
  Synthetic
acucaaugcagaagaugaa

SEQ ID NO: 1489 - RNA, 19 nt, Artificial Sequence
  Synthetic
agacauggccauugacuuu

SEQ ID NO: 1490 - RNA, 19 nt, Artificial Sequence
  Synthetic
caaugcagaagaugaaaua

SEQ ID NO: 1491 - RNA, 19 nt, Artificial Sequence
  Synthetic
ggagagaauuauagacuag

SEQ ID NO: 1492 - RNA, 19 nt, Artificial Sequence
  Synthetic
ggagagagaaagagcaacu

SEQ ID NO: 1493 - RNA, 19 nt, Artificial Sequence
  Synthetic
uaacagugaugaugucaaa

SEQ ID NO: 1494 - RNA, 19 nt, Artificial Sequence
  Synthetic
gaaagaacauguaaagugu

SEQ ID NO: 1495 - RNA, 19 nt, Artificial Sequence
  Synthetic
gauaagaauuaaaggacag

SEQ ID NO: 1496 - RNA, 19 nt, Artificial Sequence
  Synthetic
gugaguacuugauaagaau

SEQ ID NO: 1497 - RNA, 19 nt, Artificial Sequence
  Synthetic
gaauuaaaggacaggaguu

SEQ ID NO: 1498 - RNA, 19 nt, Artificial Sequence
  Synthetic
gguaagaacuacugagaaa

SEQ ID NO: 1499 - RNA, 19 nt, Artificial Sequence
  Synthetic
cgagagauuuggaaagaua

SEQ ID NO: 1500 - RNA, 19 nt, Artificial Sequence
  Synthetic
ggaagaagaauuuguagaa

SEQ ID NO: 1501 - RNA, 19 nt, Artificial Sequence
  Synthetic
ggauauacucaguuaacaa

SEQ ID NO: 1502 - RNA, 19 nt, Artificial Sequence
  Synthetic
ggugaaggugauaaaguaa

SEQ ID NO: 1503 - RNA, 19 nt, Artificial Sequence
  Synthetic
guggaaagauagagauugu

SEQ ID NO: 1504 - RNA, 19 nt, Artificial Sequence
  Synthetic
gaucuuuacuuuugggaca

SEQ ID NO: 1505 - RNA, 19 nt, Artificial Sequence
  Synthetic
gugauaaaguaaagugcuu

SEQ ID NO: 1506 - RNA, 19 nt, Artificial Sequence
  Synthetic
acagaagggacaagaauau

SEQ ID NO: 1507 - RNA, 19 nt, Artificial Sequence
  Synthetic
gaggagaagcuuugcaaaa

SEQ ID NO: 1508 - RNA, 19 nt, Artificial Sequence
  Synthetic
caucaauaaggaagaagaa

SEQ ID NO: 1509 - RNA, 19 nt, Artificial Sequence
  Synthetic
gaacagaagggacaagaau

SEQ ID NO: 1510 - RNA, 19 nt, Artificial Sequence
  Synthetic
aggugaaggugauaaagua

SEQ ID NO: 1511 - RNA, 19 nt, Artificial Sequence
  Synthetic
caagagaagaugacuuuua

SEQ ID NO: 1512 - RNA, 19 nt, Artificial Sequence
  Synthetic
cuauaaaucacuugagguu

SEQ ID NO: 1513 - RNA, 19 nt, Artificial Sequence
  Synthetic
agucauuacuuucaagcaa

SEQ ID NO: 1514 - RNA, 19 nt, Artificial Sequence
  Synthetic
gguugcagaucuagugaau

SEQ ID NO: 1515 - RNA, 19 nt, Artificial Sequence
  Synthetic
ggaagacacaggaaaguau

SEQ ID NO: 1516 - RNA, 19 nt, Artificial Sequence
  Synthetic
agugaagaagcuagauuaa

SEQ ID NO: 1517 - RNA, 19 nt, Artificial Sequence
  Synthetic
ggaaagauagagauuguuu

SEQ ID NO: 1518 - RNA, 19 nt, Artificial Sequence
  Synthetic
ugggcagguuguagauaua

SEQ ID NO: 1519 - RNA, 19 nt, Artificial Sequence
  Synthetic
ggaaagaugucagagauau

SEQ ID NO: 1520 - RNA, 19 nt, Artificial Sequence
  Synthetic
ucagauaggcuuaacaaau

SEQ ID NO: 1521 - RNA, 19 nt, Artificial Sequence
  Synthetic
caagaugagucaagucaga

SEQ ID NO: 1522 - RNA, 19 nt, Artificial Sequence
  Synthetic
ucacuguggaggagggcua

SEQ ID NO: 1523 - RNA, 19 nt, Artificial Sequence
  Synthetic
gaaagagauuaguacugaa

SEQ ID NO: 1524 - RNA, 19 nt, Artificial Sequence
  Synthetic
gugaaggugauaaaguaaa

SEQ ID NO: 1525 - RNA, 19 nt, Artificial Sequence
  Synthetic
ggagcuuucuguauauaaa

SEQ ID NO: 1526 - RNA, 19 nt, Artificial Sequence
  Synthetic
gugaaugcucagaaagaca

SEQ ID NO: 1527 - RNA, 19 nt, Artificial Sequence
  Synthetic
ugcaaaaucuguauggaua

SEQ ID NO: 1528 - RNA, 19 nt, Artificial Sequence
  Synthetic
aaauaaagcuccaggauua

SEQ ID NO: 1529 - RNA, 19 nt, Artificial Sequence
  Synthetic
cggaagauguugagugaaa

SEQ ID NO: 1530 - RNA, 19 nt, Artificial Sequence
  Synthetic
ggaaguaagccuugauaua

SEQ ID NO: 1531 - RNA, 19 nt, Artificial Sequence
  Synthetic
ccaaaagacugcugagaua

SEQ ID NO: 1532 - RNA, 19 nt, Artificial Sequence
  Synthetic
gcaauaugguuuugaagaa

SEQ ID NO: 1533 - RNA, 19 nt, Artificial Sequence
  Synthetic
ugacaaugcugaagggauu

SEQ ID NO: 1534 - RNA, 19 nt, Artificial Sequence
  Synthetic
agaaauugaccuugaguua

SEQ ID NO: 1535 - RNA, 19 nt, Artificial Sequence
  Synthetic
aaguagaggccuugaauaa

SEQ ID NO: 1536 - RNA, 19 nt, Artificial Sequence
  Synthetic
cagcaaacacggagaagaa

SEQ ID NO: 1537 - RNA, 19 nt, Artificial Sequence
  Synthetic
cgaaaugacaagagaucaa

SEQ ID NO: 1538 - RNA, 19 nt, Artificial Sequence
  Synthetic
gggcaaugcuagaacaaau

SEQ ID NO: 1539 - RNA, 19 nt, Artificial Sequence
  Synthetic
gugaaaagacaaaggaaaa

SEQ ID NO: 1540 - RNA, 19 nt, Artificial Sequence
  Synthetic
caaggaaucugaugagaaa

SEQ ID NO: 1541 - RNA, 19 nt, Artificial Sequence
  Synthetic
gguaaucaguggaguuuua

SEQ ID NO: 1542 - RNA, 19 nt, Artificial Sequence
  Synthetic
cuucaauagaggagauaua

SEQ ID NO: 1543 - RNA, 19 nt, Artificial Sequence
  Synthetic
aagcaaagcuggaagccaa

SEQ ID NO: 1544 - RNA, 19 nt, Artificial Sequence
  Synthetic
ugacaaacaugcagcuuaa

SEQ ID NO: 1545 - RNA, 19 nt, Artificial Sequence
  Synthetic
cagaagaacaacaguuaua

SEQ ID NO: 1546 - RNA, 19 nt, Artificial Sequence
  Synthetic
gguagaaguucaacaagaa

SEQ ID NO: 1547 - RNA, 19 nt, Artificial Sequence
  Synthetic
uuuauuagcuggagguuua

SEQ ID NO: 1548 - RNA, 19 nt, Artificial Sequence
  Synthetic
aaaagaaaguccugagaua

SEQ ID NO: 1549 - RNA, 19 nt, Artificial Sequence
  Synthetic
cggaagugcuacugaaaga

SEQ ID NO: 1550 - RNA, 19 nt, Artificial Sequence
  Synthetic
gaauguuagugguggauau

SEQ ID NO: 1551 - RNA, 19 nt, Artificial Sequence
  Synthetic
ggauggaacugacagaaua

SEQ ID NO: 1552 - RNA, 19 nt, Artificial Sequence
  Synthetic
gcuggaaacuauagaugaa

SEQ ID NO: 1553 - RNA, 19 nt, Artificial Sequence
  Synthetic
agauaaggcaguugaggaa

SEQ ID NO: 1554 - RNA, 19 nt, Artificial Sequence
  Synthetic
gcaaaugccacgaggccaa

SEQ ID NO: 1555 - RNA, 19 nt, Artificial Sequence
  Synthetic
ggguagaaguucaacaaga

SEQ ID NO: 1556 - RNA, 19 nt, Artificial Sequence
  Synthetic
gaacagaagagauuuguaa

SEQ ID NO: 1557 - RNA, 19 nt, Artificial Sequence
  Synthetic
gcgcacagcaauugagaau

SEQ ID NO: 1558 - RNA, 19 nt, Artificial Sequence
  Synthetic
ggagagagguccagucuga

SEQ ID NO: 1559 - RNA, 19 nt, Artificial Sequence
  Synthetic
uggcagagcugguguccau

SEQ ID NO: 1560 - RNA, 19 nt, Artificial Sequence
  Synthetic
acacaggccaucaggacaa

SEQ ID NO: 1561 - RNA, 19 nt, Artificial Sequence
  Synthetic
cagaggaggaagaggagga

SEQ ID NO: 1562 - RNA, 19 nt, Artificial Sequence
  Synthetic
ugacagaggaggaagagga

SEQ ID NO: 1563 - RNA, 19 nt, Artificial Sequence
  Synthetic
agagagguccagucugaaa

SEQ ID NO: 1564 - RNA, 19 nt, Artificial Sequence
  Synthetic
ggaagaaccggaagacgca

SEQ ID NO: 1565 - RNA, 19 nt, Artificial Sequence
  Synthetic
gagaggacgugcaaggugu

SEQ ID NO: 1566 - RNA, 19 nt, Artificial Sequence
  Synthetic
gcaugggcucugaggaguu

SEQ ID NO: 1567 - RNA, 19 nt, Artificial Sequence
  Synthetic
gcucugaggaguugcgucu

SEQ ID NO: 1568 - RNA, 19 nt, Artificial Sequence
  Synthetic
guuuggaugcuucugaaua

SEQ ID NO: 1569 - RNA, 19 nt, Artificial Sequence
  Synthetic
gggcauauucugagauugg

SEQ ID NO: 1570 - RNA, 19 nt, Artificial Sequence
  Synthetic
uggcuuaacuguaccuguu

SEQ ID NO: 1571 - RNA, 19 nt, Artificial Sequence
  Synthetic
caugggaccuaaagacagu

SEQ ID NO: 1572 - RNA, 19 nt, Artificial Sequence
  Synthetic
cugggcauauucugagauu

SEQ ID NO: 1573 - RNA, 19 nt, Artificial Sequence
  Synthetic
gagacuuuguccacagugu

SEQ ID NO: 1574 - RNA, 19 nt, Artificial Sequence
  Synthetic
gcacugaccagcccugauu

SEQ ID NO: 1575 - RNA, 19 nt, Artificial Sequence
  Synthetic
ugaggugcuucuucugcua

SEQ ID NO: 1576 - RNA, 19 nt, Artificial Sequence
  Synthetic
ggacggagcaugccaagug

SEQ ID NO: 1577 - RNA, 19 nt, Artificial Sequence
  Synthetic
caggagagagguccagucu

SEQ ID NO: 1578 - RNA, 19 nt, Artificial Sequence
  Synthetic
ggggauggcuuaacuguac

SEQ ID NO: 1579 - RNA, 19 nt, Artificial Sequence
  Synthetic
uaacuguaccuguuuggau

SEQ ID NO: 1580 - RNA, 19 nt, Artificial Sequence
  Synthetic
uuuggaugcuucugaauag

SEQ ID NO: 1581 - RNA, 19 nt, Artificial Sequence
  Synthetic
ccacguggaugggcagauc

SEQ ID NO: 1582 - RNA, 19 nt, Artificial Sequence
  Synthetic
ccagcugggcauauucuga

SEQ ID NO: 1583 - RNA, 19 nt, Artificial Sequence
  Synthetic
ccuggucugugcugagugu

SEQ ID NO: 1584 - RNA, 19 nt, Artificial Sequence
  Synthetic
auucugagauuggccauca

SEQ ID NO: 1585 - RNA, 19 nt, Artificial Sequence
  Synthetic
cuaaagacagugccaagug

SEQ ID NO: 1586 - RNA, 19 nt, Artificial Sequence
  Synthetic
gcgucuggccuccuucuau

SEQ ID NO: 1587 - RNA, 19 nt, Artificial Sequence
  Synthetic
gagccaguguucccuccau

SEQ ID NO: 1588 - RNA, 19 nt, Artificial Sequence
  Synthetic
cagaaagacacuacagaaa

SEQ ID NO: 1589 - RNA, 19 nt, Artificial Sequence
  Synthetic
gcucauuacuuuugggaca

SEQ ID NO: 1590 - RNA, 19 nt, Artificial Sequence
  Synthetic
gcaaauaucugcuagaaga

SEQ ID NO: 1591 - RNA, 19 nt, Artificial Sequence
  Synthetic
gcgccgaauugcagguuua

SEQ ID NO: 1592 - RNA, 19 nt, Artificial Sequence
  Synthetic
cuauaggucaagaggauaa

SEQ ID NO: 1593 - RNA, 19 nt, Artificial Sequence
  Synthetic
gcucaggaguugacaaaca

SEQ ID NO: 1594 - RNA, 19 nt, Artificial Sequence
  Synthetic
agauggagcuggacgauau

SEQ ID NO: 1595 - RNA, 19 nt, Artificial Sequence
  Synthetic
ggaaagaauucaaacaucu

SEQ ID NO: 1596 - RNA, 19 nt, Artificial Sequence
  Synthetic
gggcucaggaguugacaaa

SEQ ID NO: 1597 - RNA, 19 nt, Artificial Sequence
  Synthetic
agagaagggacaugaauau

SEQ ID NO: 1598 - RNA, 19 nt, Artificial Sequence
  Synthetic
aggauaaaguacagugcuu

SEQ ID NO: 1599 - RNA, 19 nt, Artificial Sequence
  Synthetic
gaggagaagcuuuguaaaa

SEQ ID NO: 1600 - RNA, 19 nt, Artificial Sequence
  Synthetic
acuucauugcagagagaaa

SEQ ID NO: 1601 - RNA, 19 nt, Artificial Sequence
  Synthetic
guacaaacuaccaagaaaa

SEQ ID NO: 1602 - RNA, 19 nt, Artificial Sequence
  Synthetic
ugcuauaggucaagaggau

SEQ ID NO: 1603 - RNA, 19 nt, Artificial Sequence
  Synthetic
aagagaagggacaugaaua

SEQ ID NO: 1604 - RNA, 19 nt, Artificial Sequence
  Synthetic
ggauguacuccguuaacaa

SEQ ID NO: 1605 - RNA, 19 nt, Artificial Sequence
  Synthetic
ggauguacuccgucaacaa

SEQ ID NO: 1606 - RNA, 19 nt, Artificial Sequence
  Synthetic
gguucuuguugcagaucua

SEQ ID NO: 1607 - RNA, 19 nt, Artificial Sequence
  Synthetic
ggaggaaagaauucaaaca

SEQ ID NO: 1608 - RNA, 19 nt, Artificial Sequence
  Synthetic
gaagggacaugaauauaua

SEQ ID NO: 1609 - RNA, 19 nt, Artificial Sequence
  Synthetic
gcuaaaugguauccagguu

SEQ ID NO: 1610 - RNA, 19 nt, Artificial Sequence
  Synthetic
agaaaauaauggaggaaag

SEQ ID NO: 1611 - RNA, 19 nt, Artificial Sequence
  Synthetic
acuggaagcccaaggaaga

SEQ ID NO: 1612 - RNA, 19 nt, Artificial Sequence
  Synthetic
gagaagauaacuuugaaca

SEQ ID NO: 1613 - RNA, 19 nt, Artificial Sequence
  Synthetic
gauuucaagcaaagaguuu

SEQ ID NO: 1614 - RNA, 19 nt, Artificial Sequence
  Synthetic
gaaagacacuacagaaaau

SEQ ID NO: 1615 - RNA, 19 nt, Artificial Sequence
  Synthetic
ucaaggacguuaagaaaau

SEQ ID NO: 1616 - RNA, 19 nt, Artificial Sequence
  Synthetic
uggacgauaucaugcuaaa

SEQ ID NO: 1617 - RNA, 19 nt, Artificial Sequence
  Synthetic
gagcaagcauguugaauuu

SEQ ID NO: 1618 - RNA, 19 nt, Artificial Sequence
  Synthetic
guaaaugggucaucagcaa

SEQ ID NO: 1619 - RNA, 19 nt, Artificial Sequence
  Synthetic
aggaggaggugaaugauaa

SEQ ID NO: 1620 - RNA, 19 nt, Artificial Sequence
  Synthetic
caaauuaguuccagggcuu

SEQ ID NO: 1621 - RNA, 19 nt, Artificial Sequence
  Synthetic
cagaugaagauaagagaau

SEQ ID NO: 1622 - RNA, 19 nt, Artificial Sequence
  Synthetic
gcagaaaugcaucgaacaa

SEQ ID NO: 1623 - RNA, 19 nt, Artificial Sequence
  Synthetic
ggaaaguaaacaaagacaa

SEQ ID NO: 1624 - RNA, 19 nt, Artificial Sequence
  Synthetic
cuggagaacuggaaaguga

SEQ ID NO: 1625 - RNA, 19 nt, Artificial Sequence
  Synthetic
augaagagaagaagggauu

SEQ ID NO: 1626 - RNA, 19 nt, Artificial Sequence
  Synthetic
gaacagauuggaucggaaa

SEQ ID NO: 1627 - RNA, 19 nt, Artificial Sequence
  Synthetic
cuaaggaggaggugaauga

SEQ ID NO: 1628 - RNA, 19 nt, Artificial Sequence
  Synthetic
ggaaagaauaugcauagaa

SEQ ID NO: 1629 - RNA, 19 nt, Artificial Sequence
  Synthetic
aaucuaaggaggaggugaa

SEQ ID NO: 1630 - RNA, 19 nt, Artificial Sequence
  Synthetic
ccagagagauggacugaca

SEQ ID NO: 1631 - RNA, 19 nt, Artificial Sequence
  Synthetic
gaggagagguugcagauga

SEQ ID NO: 1632 - RNA, 19 nt, Artificial Sequence
  Synthetic
aggcagcaacuaugaaaua

SEQ ID NO: 1633 - RNA, 19 nt, Artificial Sequence
  Synthetic
auuuauaccuggagaagga

SEQ ID NO: 1634 - RNA, 19 nt, Artificial Sequence
  Synthetic
aaucaagaucacugagcua

SEQ ID NO: 1635 - RNA, 19 nt, Artificial Sequence
  Synthetic
caaccaacggaaagaauau

SEQ ID NO: 1636 - RNA, 19 nt, Artificial Sequence
  Synthetic
ggaggaggugaaugauaaa

SEQ ID NO: 1637 - RNA, 19 nt, Artificial Sequence
  Synthetic
aggaaacaguauuguauga

SEQ ID NO: 1638 - RNA, 19 nt, Artificial Sequence
  Synthetic
caucgaacaacgagaauca

SEQ ID NO: 1639 - RNA, 19 nt, Artificial Sequence
  Synthetic
cuauggacguuaauugaaa

SEQ ID NO: 1640 - RNA, 19 nt, Artificial Sequence
  Synthetic
agauuggaucggaaaguaa

SEQ ID NO: 1641 - RNA, 19 nt, Artificial Sequence
  Synthetic
aggagagguugcagaugaa

SEQ ID NO: 1642 - RNA, 19 nt, Artificial Sequence
  Synthetic
gcaagcauguugaauuuaa

SEQ ID NO: 1643 - RNA, 19 nt, Artificial Sequence
  Synthetic
ccucgaaaaucaucaguaa

SEQ ID NO: 1644 - RNA, 19 nt, Artificial Sequence
  Synthetic
ucacaagaccagaccacua

SEQ ID NO: 1645 - RNA, 19 nt, Artificial Sequence
  Synthetic
ggacguuaauugaaaagaa

SEQ ID NO: 1646 - RNA, 19 nt, Artificial Sequence
  Synthetic
guaagaaucagauggcauu

SEQ ID NO: 1647 - RNA, 19 nt, Artificial Sequence
  Synthetic
cagcgaaucuacugggaaa

SEQ ID NO: 1648 - RNA, 19 nt, Artificial Sequence
  Synthetic
ucaaagaggagcaggaaau

SEQ ID NO: 1649 - RNA, 19 nt, Artificial Sequence
  Synthetic
gagagaaaguagcgauuau

SEQ ID NO: 1650 - RNA, 19 nt, Artificial Sequence
  Synthetic
gugauaaucuagagcacaa

SEQ ID NO: 1651 - RNA, 19 nt, Artificial Sequence
  Synthetic
gaaguaaagaucacaguaa

SEQ ID NO: 1652 - RNA, 19 nt, Artificial Sequence
  Synthetic
caagugaccuucagagcaa

SEQ ID NO: 1653 - RNA, 19 nt, Artificial Sequence
  Synthetic
aggaaauccaggagggaca

SEQ ID NO: 1654 - RNA, 19 nt, Artificial Sequence
  Synthetic
aaacaagauaguucggaua

SEQ ID NO: 1655 - RNA, 19 nt, Artificial Sequence
  Synthetic
gcaaagaaguaaagaucac

SEQ ID NO: 1656 - RNA, 19 nt, Artificial Sequence
  Synthetic
ggacuaugcuggagauaac

SEQ ID NO: 1657 - RNA, 19 nt, Artificial Sequence
  Synthetic
acaauugagaagugugaua

SEQ ID NO: 1658 - RNA, 19 nt, Artificial Sequence
  Synthetic
cagcagaggaaauuaacaa

SEQ ID NO: 1659 - RNA, 19 nt, Artificial Sequence
  Synthetic
gauuggagcucgcggaaca

SEQ ID NO: 1660 - RNA, 19 nt, Artificial Sequence
  Synthetic
gcacucagcuaaacacaaa

SEQ ID NO: 1661 - RNA, 19 nt, Artificial Sequence
  Synthetic
cuacaguggaagaaaggaa

SEQ ID NO: 1662 - RNA, 19 nt, Artificial Sequence
  Synthetic
acaugaagaccaaguuuaa

SEQ ID NO: 1663 - RNA, 19 nt, Artificial Sequence
  Synthetic
agacacagcagaagaucaa

SEQ ID NO: 1664 - RNA, 19 nt, Artificial Sequence
  Synthetic
caagucaccaggagagaaa

SEQ ID NO: 1665 - RNA, 19 nt, Artificial Sequence
  Synthetic
gcgcaaagaaguaaagauc

SEQ ID NO: 1666 - RNA, 19 nt, Artificial Sequence
  Synthetic
ugucugaugaggagauaaa

SEQ ID NO: 1667 - RNA, 19 nt, Artificial Sequence
  Synthetic
caauauauggugcugauaa

SEQ ID NO: 1668 - RNA, 19 nt, Artificial Sequence
  Synthetic
cauaggauguggacgguau

SEQ ID NO: 1669 - RNA, 19 nt, Artificial Sequence
  Synthetic
gaaggagaccugugaccaa

SEQ ID NO: 1670 - RNA, 19 nt, Artificial Sequence
  Synthetic
gggaaaugucugaugagga

SEQ ID NO: 1671 - RNA, 19 nt, Artificial Sequence
  Synthetic
aauagaugccuuacaguua

SEQ ID NO: 1672 - RNA, 19 nt, Artificial Sequence
  Synthetic
caaguaaaacagauggaaa

SEQ ID NO: 1673 - RNA, 19 nt, Artificial Sequence
  Synthetic
gaaagugcacucagcuaaa

SEQ ID NO: 1674 - RNA, 19 nt, Artificial Sequence
  Synthetic
cuaacaagccagcuggaau

SEQ ID NO: 1675 - RNA, 19 nt, Artificial Sequence
  Synthetic
uuaacaacaugaagaccaa

SEQ ID NO: 1676 - RNA, 19 nt, Artificial Sequence
  Synthetic
acacagcagaggaaauuaa

SEQ ID NO: 1677 - RNA, 19 nt, Artificial Sequence
  Synthetic
ccaaaucaguagagaguaa

SEQ ID NO: 1678 - RNA, 19 nt, Artificial Sequence
  Synthetic
gaacaaagcacaucagaaa

SEQ ID NO: 1679 - RNA, 19 nt, Artificial Sequence
  Synthetic
caagaaaguacgagauuua

SEQ ID NO: 1680 - RNA, 19 nt, Artificial Sequence
  Synthetic
guuagaugauggugaaaua

SEQ ID NO: 1681 - RNA, 19 nt, Artificial Sequence
  Synthetic
ucacaaaggcagagaguca

SEQ ID NO: 1682 - RNA, 19 nt, Artificial Sequence
  Synthetic
gcaagaauaugaagaagua

SEQ ID NO: 1683 - RNA, 19 nt, Artificial Sequence
  Synthetic
ccauacagcuucauaaaua

SEQ ID NO: 1684 - RNA, 19 nt, Artificial Sequence
  Synthetic
guggaaagaugcugaguuu

SEQ ID NO: 1685 - RNA, 19 nt, Artificial Sequence
  Synthetic
ggaaagaaugagucuaaua

SEQ ID NO: 1686 - RNA, 19 nt, Artificial Sequence
  Synthetic
gaacuuaucuagugaggau

SEQ ID NO: 1687 - RNA, 19 nt, Artificial Sequence
  Synthetic
ggaaauggcugaacuagaa

SEQ ID NO: 1688 - RNA, 19 nt, Artificial Sequence
  Synthetic
ugaaagaucuguagagagu

SEQ ID NO: 1689 - RNA, 19 nt, Artificial Sequence
  Synthetic
gcagauaguucuaccagua

SEQ ID NO: 1690 - RNA, 19 nt, Artificial Sequence
  Synthetic
caauauggaacucgaauua

SEQ ID NO: 1691 - RNA, 19 nt, Artificial Sequence
  Synthetic
ccacaggacccaagaauga

SEQ ID NO: 1692 - RNA, 19 nt, Artificial Sequence
  Synthetic
gaagauguuccuuggauaa

SEQ ID NO: 1693 - RNA, 19 nt, Artificial Sequence
  Synthetic
gcauagaaauggaagaaag

SEQ ID NO: 1694 - RNA, 19 nt, Artificial Sequence
  Synthetic
ggucaagugaugaauauua

SEQ ID NO: 1695 - RNA, 19 nt, Artificial Sequence
  Synthetic
caacagaaagggucaacaa

SEQ ID NO: 1696 - RNA, 19 nt, Artificial Sequence
  Synthetic
cugaagauaccguuaauaa

SEQ ID NO: 1697 - RNA, 19 nt, Artificial Sequence
  Synthetic
gaacagaaagaaauggauu

SEQ ID NO: 1698 - RNA, 19 nt, Artificial Sequence
  Synthetic
gaagccagcucaagcaaua

SEQ ID NO: 1699 - RNA, 19 nt, Artificial Sequence
  Synthetic
gagaaucccaggacagaaa

SEQ ID NO: 1700 - RNA, 19 nt, Artificial Sequence
  Synthetic
gcaagaugcugauucauua

SEQ ID NO: 1701 - RNA, 19 nt, Artificial Sequence
  Synthetic
gcugagaggcauccagaaa

SEQ ID NO: 1702 - RNA, 19 nt, Artificial Sequence
  Synthetic
ggacagaggacaauggcuu

SEQ ID NO: 1703 - RNA, 19 nt, Artificial Sequence
  Synthetic
cagaagugaugaacuguua

SEQ ID NO: 1704 - RNA, 19 nt, Artificial Sequence
  Synthetic
gaaaauggguaguuagcua

SEQ ID NO: 1705 - RNA, 19 nt, Artificial Sequence
  Synthetic
gaagugggcuccaguauua

SEQ ID NO: 1706 - RNA, 19 nt, Artificial Sequence
  Synthetic
ccagugaacuuaaagaauu

SEQ ID NO: 1707 - RNA, 19 nt, Artificial Sequence
  Synthetic
ggagagauucugaggauaa

SEQ ID NO: 1708 - RNA, 19 nt, Artificial Sequence
  Synthetic
aggaggaggaugaggguaa

SEQ ID NO: 1709 - RNA, 19 nt, Artificial Sequence
  Synthetic
gugcaaagaugaucaagaa

SEQ ID NO: 1710 - RNA, 19 nt, Artificial Sequence
  Synthetic
gggcuggagcucagagaaa

SEQ ID NO: 1711 - RNA, 19 nt, Artificial Sequence
  Synthetic
caaagaugaucaagaaaga

SEQ ID NO: 1712 - RNA, 19 nt, Artificial Sequence
  Synthetic
ggacgaggaaguagaguau

SEQ ID NO: 1713 - RNA, 19 nt, Artificial Sequence
  Synthetic
gcaacugccucaaguauaa

SEQ ID NO: 1714 - RNA, 19 nt, Artificial Sequence
  Synthetic
gcucagagaaagucaagaa

SEQ ID NO: 1715 - RNA, 19 nt, Artificial Sequence
  Synthetic
ccaggaagcccgagagcau

SEQ ID NO: 1716 - RNA, 19 nt, Artificial Sequence
  Synthetic
agaacaaggagaagcgcaa

SEQ ID NO: 1717 - RNA, 19 nt, Artificial Sequence
  Synthetic
gcacugagaaugaggccua

SEQ ID NO: 1718 - RNA, 19 nt, Artificial Sequence
  Synthetic
aaacauaagaacaaggaga

SEQ ID NO: 1719 - RNA, 19 nt, Artificial Sequence
  Synthetic
ggccaaaugccgaggcuau

SEQ ID NO: 1720 - RNA, 19 nt, Artificial Sequence
  Synthetic
acgaggaaguagaguauga

SEQ ID NO: 1721 - RNA, 19 nt, Artificial Sequence
  Synthetic
ccacacaggcuuaguaaaa

SEQ ID NO: 1722 - RNA, 19 nt, Artificial Sequence
  Synthetic
gaaaggucuacaagaguua

SEQ ID NO: 1723 - RNA, 19 nt, Artificial Sequence
  Synthetic
caggcaaacauaagaacaa

SEQ ID NO: 1724 - RNA, 19 nt, Artificial Sequence
  Synthetic
agucguacuuugagaguca

SEQ ID NO: 1725 - RNA, 19 nt, Artificial Sequence
  Synthetic
cgaucaagguucagcagau

SEQ ID NO: 1726 - RNA, 19 nt, Artificial Sequence
  Synthetic
gaaaccaaccagugaagaa

SEQ ID NO: 1727 - RNA, 19 nt, Artificial Sequence
  Synthetic
aaggaugggcagacagaua

SEQ ID NO: 1728 - RNA, 19 nt, Artificial Sequence
  Synthetic
aagaugaggaggaggauga

SEQ ID NO: 1729 - RNA, 19 nt, Artificial Sequence
  Synthetic
ggaagauccuggcagagaa

SEQ ID NO: 1730 - RNA, 19 nt, Artificial Sequence
  Synthetic
agcagaacuuggaggcuua

SEQ ID NO: 1731 - RNA, 19 nt, Artificial Sequence
  Synthetic
caguggaagaacagcuaaa

SEQ ID NO: 1732 - RNA, 19 nt, Artificial Sequence
  Synthetic
gggagagauucugaggaua

SEQ ID NO: 1733 - RNA, 19 nt, Artificial Sequence
  Synthetic
acauggacgaggaggacua

SEQ ID NO: 1734 - RNA, 19 nt, Artificial Sequence
  Synthetic
caacacagcccaaccuaua

SEQ ID NO: 1735 - RNA, 19 nt, Artificial Sequence
  Synthetic
gugaggaggaugaagauga

SEQ ID NO: 1736 - RNA, 19 nt, Artificial Sequence
  Synthetic
gccgugaggugaugagcua

SEQ ID NO: 1737 - RNA, 19 nt, Artificial Sequence
  Synthetic
aggaagagguggaggaaga

SEQ ID NO: 1738 - RNA, 19 nt, Artificial Sequence
  Synthetic
ccagaaagguggaagaaga

SEQ ID NO: 1739 - RNA, 19 nt, Artificial Sequence
  Synthetic
gggaagacguggacaacau

SEQ ID NO: 1740 - RNA, 19 nt, Artificial Sequence
  Synthetic
guauaaugcuaaagacaca

SEQ ID NO: 1741 - RNA, 19 nt, Artificial Sequence
  Synthetic
gagagaagcucaaacgaga

SEQ ID NO: 1742 - RNA, 19 nt, Artificial Sequence
  Synthetic
ugaaggagcugcuggagaa

SEQ ID NO: 1743 - RNA, 19 nt, Artificial Sequence
  Synthetic
uggaagacaccguggacaa

SEQ ID NO: 1744 - RNA, 19 nt, Artificial Sequence
  Synthetic
augcagagguagaguauga

SEQ ID NO: 1745 - RNA, 19 nt, Artificial Sequence
  Synthetic
ggacagagaugacuccaaa

SEQ ID NO: 1746 - RNA, 19 nt, Artificial Sequence
  Synthetic
ggguuaagcuacagagaag

SEQ ID NO: 1747 - RNA, 19 nt, Artificial Sequence
  Synthetic
gagcugaaguauuggcaga

SEQ ID NO: 1748 - RNA, 19 nt, Artificial Sequence
  Synthetic
aggaggaagaagaggaaga

SEQ ID NO: 1749 - RNA, 19 nt, Artificial Sequence
  Synthetic
ccaacugcaugaaguauaa

SEQ ID NO: 1750 - RNA, 19 nt, Artificial Sequence
  Synthetic
ccaaggagcaggagcugua

SEQ ID NO: 1751 - RNA, 19 nt, Artificial Sequence
  Synthetic
caagaaggagccagaggaa

SEQ ID NO: 1752 - RNA, 19 nt, Artificial Sequence
  Synthetic
ccuagaagcaucagugaga

SEQ ID NO: 1753 - RNA, 19 nt, Artificial Sequence
  Synthetic
cuacaauggcucaggcaga

SEQ ID NO: 1754 - RNA, 19 nt, Artificial Sequence
  Synthetic
ggaagagagagaagcucaa

SEQ ID NO: 1755 - RNA, 19 nt, Artificial Sequence
  Synthetic
cagugaaggaggagcugaa

SEQ ID NO: 1756 - RNA, 19 nt, Artificial Sequence
  Synthetic
ccugggaagacguggacaa

SEQ ID NO: 1757 - RNA, 19 nt, Artificial Sequence
  Synthetic
gguagaccggcuugagaaa

SEQ ID NO: 1758 - RNA, 19 nt, Artificial Sequence
  Synthetic
cagccagcaucgaggaaga

SEQ ID NO: 1759 - RNA, 19 nt, Artificial Sequence
  Synthetic
cugaagaccuggaugcaga

SEQ ID NO: 1760 - RNA, 19 nt, Artificial Sequence
  Synthetic
ugcaauaguaacaaggaaa

SEQ ID NO: 1761 - RNA, 19 nt, Artificial Sequence
  Synthetic
gagcaggaugagaagacaa

SEQ ID NO: 1762 - RNA, 19 nt, Artificial Sequence
  Synthetic
gugauggagaggaggaaga

SEQ ID NO: 1763 - RNA, 19 nt, Artificial Sequence
  Synthetic
ugaaggaggagcugaagua

SEQ ID NO: 1764 - RNA, 19 nt, Artificial Sequence
  Synthetic
gaggaggacuuuaaccuua

SEQ ID NO: 1765 - RNA, 19 nt, Artificial Sequence
  Synthetic
uggaggaguuugaggagga

SEQ ID NO: 1766 - RNA, 19 nt, Artificial Sequence
  Synthetic
gcagaaagggcuaggugca

SEQ ID NO: 1767 - RNA, 19 nt, Artificial Sequence
  Synthetic
gaaagugaaugaagggaaa

SEQ ID NO: 1768 - RNA, 19 nt, Artificial Sequence
  Synthetic
gagacaagcuguaaauaaa

SEQ ID NO: 1769 - RNA, 19 nt, Artificial Sequence
  Synthetic
aaugaaagguuuuggguuu

SEQ ID NO: 1770 - RNA, 19 nt, Artificial Sequence
  Synthetic
ggaggaauuuguagaagaa

SEQ ID NO: 1771 - RNA, 19 nt, Artificial Sequence
  Synthetic
guauugaacaagaaggaua

SEQ ID NO: 1772 - RNA, 19 nt, Artificial Sequence
  Synthetic
guucaaagcugaugcccaa

SEQ ID NO: 1773 - RNA, 19 nt, Artificial Sequence
  Synthetic
gagcuggaucuuagagaaa

SEQ ID NO: 1774 - RNA, 19 nt, Artificial Sequence
  Synthetic
uaacaucaguggaggguau

SEQ ID NO: 1775 - RNA, 19 nt, Artificial Sequence
  Synthetic
ccaaagucaugcagaaaga

SEQ ID NO: 1776 - RNA, 19 nt, Artificial Sequence
  Synthetic
acucaagaaccaagagcaa

SEQ ID NO: 1777 - RNA, 19 nt, Artificial Sequence
  Synthetic
agggugagauggacagaaa

SEQ ID NO: 1778 - RNA, 19 nt, Artificial Sequence
  Synthetic
cagccaaagucaugcagaa

SEQ ID NO: 1779 - RNA, 19 nt, Artificial Sequence
  Synthetic
ggagagggcuauagaucuu

SEQ ID NO: 1780 - RNA, 19 nt, Artificial Sequence
  Synthetic
guaagcaaguaaaggaaaa

SEQ ID NO: 1781 - RNA, 19 nt, Artificial Sequence
  Synthetic
ggacagaaaauguaagcaa

SEQ ID NO: 1782 - RNA, 19 nt, Artificial Sequence
  Synthetic
ggaugaagucggaccacaa

SEQ ID NO: 1783 - RNA, 19 nt, Artificial Sequence
  Synthetic
gcgcaguauggguuggaaa

SEQ ID NO: 1784 - RNA, 19 nt, Artificial Sequence
  Synthetic
gcuuugaucuuguaguuua

SEQ ID NO: 1785 - RNA, 19 nt, Artificial Sequence
  Synthetic
agagacaagcuguaaauaa

SEQ ID NO: 1786 - RNA, 19 nt, Artificial Sequence
  Synthetic
agaaagugaaugaagggaa

SEQ ID NO: 1787 - RNA, 19 nt, Artificial Sequence
  Synthetic
cugaaauggaagaagaaaa

SEQ ID NO: 1788 - RNA, 19 nt, Artificial Sequence
  Synthetic
ccaguuugcaggagcauua

SEQ ID NO: 1789 - RNA, 19 nt, Artificial Sequence
  Synthetic
gaugagauugacugggaaa

SEQ ID NO: 1790 - RNA, 19 nt, Artificial Sequence
  Synthetic
gcacaguaguuuaaaucuu

SEQ ID NO: 1791 - RNA, 19 nt, Artificial Sequence
  Synthetic
gggcagccauugagauuau

SEQ ID NO: 1792 - RNA, 19 nt, Artificial Sequence
  Synthetic
gcaggagcauuaagaagaa

SEQ ID NO: 1793 - RNA, 19 nt, Artificial Sequence
  Synthetic
aggaagaaccagagccuga

SEQ ID NO: 1794 - RNA, 19 nt, Artificial Sequence
  Synthetic
aaagaaaggacgacguaau

SEQ ID NO: 1795 - RNA, 19 nt, Artificial Sequence
  Synthetic
gaucugaauguaagaacua

SEQ ID NO: 1796 - RNA, 19 nt, Artificial Sequence
  Synthetic
gggcuauagaucuuaauaa

SEQ ID NO: 1797 - RNA, 19 nt, Artificial Sequence
  Synthetic
agauaauaccagagaagaa

SEQ ID NO: 1798 - RNA, 19 nt, Artificial Sequence
  Synthetic
ccauuaaaguugcgguauu

SEQ ID NO: 1799 - RNA, 19 nt, Artificial Sequence
  Synthetic
agacaaaggugacuuauaa

SEQ ID NO: 1800 - RNA, 19 nt, Artificial Sequence
  Synthetic
guuagaaggccaugaggaa

SEQ ID NO: 1801 - RNA, 19 nt, Artificial Sequence
  Synthetic
caaucaagaucugggauaa

SEQ ID NO: 1802 - RNA, 19 nt, Artificial Sequence
  Synthetic
cugcugaacuugugugcaa

SEQ ID NO: 1803 - RNA, 19 nt, Artificial Sequence
  Synthetic
gcaaaggaguuuacuguuu

SEQ ID NO: 1804 - RNA, 19 nt, Artificial Sequence
  Synthetic
agacauaguuuacagagaa

SEQ ID NO: 1805 - RNA, 19 nt, Artificial Sequence
  Synthetic
agucagaucaaguggaauu

SEQ ID NO: 1806 - RNA, 19 nt, Artificial Sequence
  Synthetic
ugucaauguuguagacuuu

SEQ ID NO: 1807 - RNA, 19 nt, Artificial Sequence
  Synthetic
gagagaagacuguaauaau

SEQ ID NO: 1808 - RNA, 19 nt, Artificial Sequence
  Synthetic
ccagagaagaauucacuua

SEQ ID NO: 1809 - RNA, 19 nt, Artificial Sequence
  Synthetic
gaagaagcuuaucgagaga

SEQ ID NO: 1810 - RNA, 19 nt, Artificial Sequence
  Synthetic
gaccuuaaauggacacaaa

SEQ ID NO: 1811 - RNA, 19 nt, Artificial Sequence
  Synthetic
gcacucaaguuuaugaauu

SEQ ID NO: 1812 - RNA, 19 nt, Artificial Sequence
  Synthetic
ugacaacacuaucagauua

SEQ ID NO: 1813 - RNA, 19 nt, Artificial Sequence
  Synthetic
acaaucaagaucugggaua

SEQ ID NO: 1814 - RNA, 19 nt, Artificial Sequence
  Synthetic
ugucauaccuggaugccaa

SEQ ID NO: 1815 - RNA, 19 nt, Artificial Sequence
  Synthetic
aaguggaauuuguggaaca

SEQ ID NO: 1816 - RNA, 19 nt, Artificial Sequence
  Synthetic
caguaugaugagagaguga

SEQ ID NO: 1817 - RNA, 19 nt, Artificial Sequence
  Synthetic
gagcauuccggaagaguuu

SEQ ID NO: 1818 - RNA, 19 nt, Artificial Sequence
  Synthetic
cagagagagaagacuguaa

SEQ ID NO: 1819 - RNA, 19 nt, Artificial Sequence
  Synthetic
ccgaagugaaacaagcaaa

SEQ ID NO: 1820 - RNA, 19 nt, Artificial Sequence
  Synthetic
cugcuuaaaccaagaaaca

SEQ ID NO: 1821 - RNA, 19 nt, Artificial Sequence
  Synthetic
gaagauaauaccagagaag

SEQ ID NO: 1822 - RNA, 19 nt, Artificial Sequence
  Synthetic
gauaacaagaggauaguca

SEQ ID NO: 1823 - RNA, 19 nt, Artificial Sequence
  Synthetic
uagaaggccaugaggaauu

SEQ ID NO: 1824 - RNA, 19 nt, Artificial Sequence
  Synthetic
ggaugagcaacaacaguaa

SEQ ID NO: 1825 - RNA, 19 nt, Artificial Sequence
  Synthetic
agaauguggugcauguuua

SEQ ID NO: 1826 - RNA, 19 nt, Artificial Sequence
  Synthetic
gagagagaagacuguaaua

SEQ ID NO: 1827 - RNA, 19 nt, Artificial Sequence
  Synthetic
uaauauagcucuuggacaa

SEQ ID NO: 1828 - RNA, 19 nt, Artificial Sequence
  Synthetic
aaaccaagcuuaacagaga

SEQ ID NO: 1829 - RNA, 19 nt, Artificial Sequence
  Synthetic
ccuaaugccuuuacuuuua

SEQ ID NO: 1830 - RNA, 19 nt, Artificial Sequence
  Synthetic
ggacaauauaugggagcau

SEQ ID NO: 1831 - RNA, 19 nt, Artificial Sequence
  Synthetic
cggaacauguugcagaaaa

SEQ ID NO: 1832 - RNA, 19 nt, Artificial Sequence
  Synthetic
gaagauuauaagagcacau

SEQ ID NO: 1833 - RNA, 19 nt, Artificial Sequence
  Synthetic
caagcuuaacagagacuua

SEQ ID NO: 1834 - RNA, 19 nt, Artificial Sequence
  Synthetic
aggaaagcauggaagagga

SEQ ID NO: 1835 - RNA, 19 nt, Artificial Sequence
  Synthetic
ccagaucucuauauugaaa

SEQ ID NO: 1836 - RNA, 19 nt, Artificial Sequence
  Synthetic
acaucgaaaccaagcuuaa

SEQ ID NO: 1837 - RNA, 19 nt, Artificial Sequence
  Synthetic
aagcacauuuacagccuaa

SEQ ID NO: 1838 - RNA, 19 nt, Artificial Sequence
  Synthetic
cgaugauggacgaccagaa

SEQ ID NO: 1839 - RNA, 19 nt, Artificial Sequence
  Synthetic
caucauagcuuuugcguua

SEQ ID NO: 1840 - RNA, 19 nt, Artificial Sequence
  Synthetic
cgucaaagcuguuaagaau

SEQ ID NO: 1841 - RNA, 19 nt, Artificial Sequence
  Synthetic
gcagaaagguuuagguuca

SEQ ID NO: 1842 - RNA, 19 nt, Artificial Sequence
  Synthetic
auacuaagguagagccaua

SEQ ID NO: 1843 - RNA, 19 nt, Artificial Sequence
  Synthetic
agaaauggcuguugcguau

SEQ ID NO: 1844 - RNA, 19 nt, Artificial Sequence
  Synthetic
ccagaacucuaaugggaaa

SEQ ID NO: 1845 - RNA, 19 nt, Artificial Sequence
  Synthetic
guacaaagauccacaagau

SEQ ID NO: 1846 - RNA, 19 nt, Artificial Sequence
  Synthetic
gguauugaguuguggacau

SEQ ID NO: 1847 - RNA, 19 nt, Artificial Sequence
  Synthetic
gggagaugcauaagcuuaa

SEQ ID NO: 1848 - RNA, 19 nt, Artificial Sequence
  Synthetic
gaauuuagcagaaaggaau

SEQ ID NO: 1849 - RNA, 19 nt, Artificial Sequence
  Synthetic
cagccaaguuuaaagauuu

SEQ ID NO: 1850 - RNA, 19 nt, Artificial Sequence
  Synthetic
gaaacaugauugcggauga

SEQ ID NO: 1851 - RNA, 19 nt, Artificial Sequence
  Synthetic
gagcaggagcugaaggaca

SEQ ID NO: 1852 - RNA, 19 nt, Artificial Sequence
  Synthetic
gugcacauuuggaagcuaa

SEQ ID NO: 1853 - RNA, 19 nt, Artificial Sequence
  Synthetic
cagaaugaguggagacuag

SEQ ID NO: 1854 - RNA, 19 nt, Artificial Sequence
  Synthetic
ucagagagcauuugucuaa

SEQ ID NO: 1855 - RNA, 19 nt, Artificial Sequence
  Synthetic
gggagaggaucuugucgua

SEQ ID NO: 1856 - RNA, 19 nt, Artificial Sequence
  Synthetic
ugaauuuagcagaaaggaa

SEQ ID NO: 1857 - RNA, 19 nt, Artificial Sequence
  Synthetic
ggaguaagauuaugaaaug

SEQ ID NO: 1858 - RNA, 19 nt, Artificial Sequence
  Synthetic
ugacagaacuuggguguga

SEQ ID NO: 1859 - RNA, 19 nt, Artificial Sequence
  Synthetic
cagugugaauuuagcagaa

SEQ ID NO: 1860 - RNA, 19 nt, Artificial Sequence
  Synthetic
agaagaagcuggagcggcu

SEQ ID NO: 1861 - RNA, 19 nt, Artificial Sequence
  Synthetic
acaaagauccacaagauga

SEQ ID NO: 1862 - RNA, 19 nt, Artificial Sequence
  Synthetic
caaagauccacaagaugaa

SEQ ID NO: 1863 - RNA, 19 nt, Artificial Sequence
  Synthetic
cagcaauucacgauuuaua

SEQ ID NO: 1864 - RNA, 19 nt, Artificial Sequence
  Synthetic
gcagcaacucagugugaau

SEQ ID NO: 1865 - RNA, 19 nt, Artificial Sequence
  Synthetic
gcuaaaggcucuucugcca

SEQ ID NO: 1866 - RNA, 19 nt, Artificial Sequence
  Synthetic
ugugaaagcuuuacaucau

SEQ ID NO: 1867 - RNA, 19 nt, Artificial Sequence
  Synthetic
aggaauuucuagauggcau

SEQ ID NO: 1868 - RNA, 19 nt, Artificial Sequence
  Synthetic
uagcagagauggucacaga

SEQ ID NO: 1869 - RNA, 19 nt, Artificial Sequence
  Synthetic
uagaagagcuuaagaguaa

SEQ ID NO: 1870 - RNA, 19 nt, Artificial Sequence
  Synthetic
ugaaagaugauguggauaa

SEQ ID NO: 1871 - RNA, 19 nt, Artificial Sequence
  Synthetic
cuacaaagaugaagaacuu

SEQ ID NO: 1872 - RNA, 19 nt, Artificial Sequence
  Synthetic
gcacuuggguuuagaggaa

SEQ ID NO: 1873 - RNA, 19 nt, Artificial Sequence
  Synthetic
gaacaaagaccuauaucaa

SEQ ID NO: 1874 - RNA, 19 nt, Artificial Sequence
  Synthetic
gauuugugguugaagaaua

SEQ ID NO: 1875 - RNA, 19 nt, Artificial Sequence
  Synthetic
ggaacgaagugauaaguau

SEQ ID NO: 1876 - RNA, 19 nt, Artificial Sequence
  Synthetic
caauaagacacuugaguuu

SEQ ID NO: 1877 - RNA, 19 nt, Artificial Sequence
  Synthetic
aaauggaagugaauggaaa

SEQ ID NO: 1878 - RNA, 19 nt, Artificial Sequence
  Synthetic
gaaaugaaccggacaagaa

SEQ ID NO: 1879 - RNA, 19 nt, Artificial Sequence
  Synthetic
cugauaaguuggaagaaaa

SEQ ID NO: 1880 - RNA, 19 nt, Artificial Sequence
  Synthetic
gaaagaaguagaagagcuu

SEQ ID NO: 1881 - RNA, 19 nt, Artificial Sequence
  Synthetic
ccugauaaguuggaagaaa

SEQ ID NO: 1882 - RNA, 19 nt, Artificial Sequence
  Synthetic
agacaaacaucuagucaca

SEQ ID NO: 1883 - RNA, 19 nt, Artificial Sequence
  Synthetic
caaccaaaaugaagacaaa

SEQ ID NO: 1884 - RNA, 19 nt, Artificial Sequence
  Synthetic
gaagauagguaagagguaa

SEQ ID NO: 1885 - RNA, 19 nt, Artificial Sequence
  Synthetic
gaacgaagugauaaguaua

SEQ ID NO: 1886 - RNA, 19 nt, Artificial Sequence
  Synthetic
cagugaauuucuugaggaa

SEQ ID NO: 1887 - RNA, 19 nt, Artificial Sequence
  Synthetic
gcauggagcacuuggguuu

SEQ ID NO: 1888 - RNA, 19 nt, Artificial Sequence
  Synthetic
acaaagaauaugaggacga

SEQ ID NO: 1889 - RNA, 19 nt, Artificial Sequence
  Synthetic
acucaaaccaucucagaaa

SEQ ID NO: 1890 - RNA, 19 nt, Artificial Sequence
  Synthetic
gcuaaaggaggcaaauaaa

SEQ ID NO: 1891 - RNA, 19 nt, Artificial Sequence
  Synthetic
gcucaguacuccagaaaau

SEQ ID NO: 1892 - RNA, 19 nt, Artificial Sequence
  Synthetic
gggaauaaaccaagugacu

SEQ ID NO: 1893 - RNA, 19 nt, Artificial Sequence
  Synthetic
aggaggauguggugucaaa

SEQ ID NO: 1894 - RNA, 19 nt, Artificial Sequence
  Synthetic
ggacgaaauagauuguuua

SEQ ID NO: 1895 - RNA, 19 nt, Artificial Sequence
  Synthetic
aagaaguagaagagcuuaa

SEQ ID NO: 1896 - RNA, 19 nt, Artificial Sequence
  Synthetic
aagaacagguagaaguaau

SEQ ID NO: 1897 - RNA, 19 nt, Artificial Sequence
  Synthetic
gaacaguaugagcgugaaa

SEQ ID NO: 1898 - RNA, 19 nt, Artificial Sequence
  Synthetic
agguagaaguaauguuaga

SEQ ID NO: 1899 - RNA, 19 nt, Artificial Sequence
  Synthetic
agaauauguuugugggaaa

SEQ ID NO: 1900 - RNA, 19 nt, Artificial Sequence
  Synthetic
gaacagaagaugaaagaga

SEQ ID NO: 1901 - RNA, 19 nt, Artificial Sequence
  Synthetic
aagccaagaugaaggaaua

SEQ ID NO: 1902 - RNA, 19 nt, Artificial Sequence
  Synthetic
cuuaaaggguggagaccaa

SEQ ID NO: 1903 - RNA, 19 nt, Artificial Sequence
  Synthetic
gaacgaagaaugaguacaa

SEQ ID NO: 1904 - RNA, 19 nt, Artificial Sequence
  Synthetic
gcucguaucuggaggaaga

SEQ ID NO: 1905 - RNA, 19 nt, Artificial Sequence
  Synthetic
gcaacaggaugguggucaa

SEQ ID NO: 1906 - RNA, 19 nt, Artificial Sequence
  Synthetic
ggacaucauacaagugaaa

SEQ ID NO: 1907 - RNA, 19 nt, Artificial Sequence
  Synthetic
aggagaaagaggaggaaaa

SEQ ID NO: 1908 - RNA, 19 nt, Artificial Sequence
  Synthetic
gaaaauagucucauggaaa

SEQ ID NO: 1909 - RNA, 19 nt, Artificial Sequence
  Synthetic
cagcacaacaaguggcaaa

SEQ ID NO: 1910 - RNA, 19 nt, Artificial Sequence
  Synthetic
caguagaacagaagaugaa

SEQ ID NO: 1911 - RNA, 19 nt, Artificial Sequence
  Synthetic
cugaagacguuuagacaca

SEQ ID NO: 1912 - RNA, 19 nt, Artificial Sequence
  Synthetic
ccgaagagaugcagaugau

SEQ ID NO: 1913 - RNA, 19 nt, Artificial Sequence
  Synthetic
ggaagagauugccagguaa

SEQ ID NO: 1914 - RNA, 19 nt, Artificial Sequence
  Synthetic
gggaagagcaugcguguga

SEQ ID NO: 1915 - RNA, 19 nt, Artificial Sequence
  Synthetic
guguguagcagcagguaua

SEQ ID NO: 1916 - RNA, 19 nt, Artificial Sequence
  Synthetic
aaacaaggacaauuggaaa

SEQ ID NO: 1917 - RNA, 19 nt, Artificial Sequence
  Synthetic
aggaagagauugccaggua

SEQ ID NO: 1918 - RNA, 19 nt, Artificial Sequence
  Synthetic
cauacaagugaaagcgaua

SEQ ID NO: 1919 - RNA, 19 nt, Artificial Sequence
  Synthetic
caggaaugcuggauagaca

SEQ ID NO: 1920 - RNA, 19 nt, Artificial Sequence
  Synthetic
gaagagauugccagguaaa

SEQ ID NO: 1921 - RNA, 19 nt, Artificial Sequence
  Synthetic
agaagaauaaggagaaaga

SEQ ID NO: 1922 - RNA, 19 nt, Artificial Sequence
  Synthetic
gaggaaccauggaggaauu

SEQ ID NO: 1923 - RNA, 19 nt, Artificial Sequence
  Synthetic
gcaaauaccuagacuucau

SEQ ID NO: 1924 - RNA, 19 nt, Artificial Sequence
  Synthetic
ccacacagggaaaggauuu

SEQ ID NO: 1925 - RNA, 19 nt, Artificial Sequence
  Synthetic
uaagaaugcuggauagaca

SEQ ID NO: 1926 - RNA, 19 nt, Artificial Sequence
  Synthetic
ccgugaaggaggagaagga

SEQ ID NO: 1927 - RNA, 19 nt, Artificial Sequence
  Synthetic
ccaaguacauucuaaguau

SEQ ID NO: 1928 - RNA, 19 nt, Artificial Sequence
  Synthetic
uggcugaauuccuggauau

SEQ ID NO: 1929 - RNA, 19 nt, Artificial Sequence
  Synthetic
ccacaaagggaaagugaaa

SEQ ID NO: 1930 - RNA, 19 nt, Artificial Sequence
  Synthetic
cuacaaaagacaaggaaaa

SEQ ID NO: 1931 - RNA, 19 nt, Artificial Sequence
  Synthetic
aagcauuggaggaggauaa

SEQ ID NO: 1932 - RNA, 19 nt, Artificial Sequence
  Synthetic
ggagaaaacacgaugaaaa

SEQ ID NO: 1933 - RNA, 19 nt, Artificial Sequence
  Synthetic
ggaacugagaagaaggaaa

SEQ ID NO: 1934 - RNA, 19 nt, Artificial Sequence
  Synthetic
gcuccaagcuauagaacuu

SEQ ID NO: 1935 - RNA, 19 nt, Artificial Sequence
  Synthetic
ccccaaaggugaaggaaua

SEQ ID NO: 1936 - RNA, 19 nt, Artificial Sequence
  Synthetic
gagugaagccaaagaagaa

SEQ ID NO: 1937 - RNA, 19 nt, Artificial Sequence
  Synthetic
ggaaagagggcuugcauga

SEQ ID NO: 1938 - RNA, 19 nt, Artificial Sequence
  Synthetic
gaagaaagacaaagaagau

SEQ ID NO: 1939 - RNA, 19 nt, Artificial Sequence
  Synthetic
ccauaaguuuagaugcaaa

SEQ ID NO: 1940 - RNA, 19 nt, Artificial Sequence
  Synthetic
cgaaaaugacagagaguau

SEQ ID NO: 1941 - RNA, 19 nt, Artificial Sequence
  Synthetic
ggggaaagugucagagaaa

SEQ ID NO: 1942 - RNA, 19 nt, Artificial Sequence
  Synthetic
agaagaaauucaaggaguu

SEQ ID NO: 1943 - RNA, 19 nt, Artificial Sequence
  Synthetic
caacagugaaugugaagaa

SEQ ID NO: 1944 - RNA, 19 nt, Artificial Sequence
  Synthetic
gugaagaguccacaagaaa

SEQ ID NO: 1945 - RNA, 19 nt, Artificial Sequence
  Synthetic
gagagaaguuuaaagaaca

SEQ ID NO: 1946 - RNA, 19 nt, Artificial Sequence
  Synthetic
gagaaaagcaacagugaau

SEQ ID NO: 1947 - RNA, 19 nt, Artificial Sequence
  Synthetic
gagaagaaauucaaggagu

SEQ ID NO: 1948 - RNA, 19 nt, Artificial Sequence
  Synthetic
ggauggaucuucugaauuu

SEQ ID NO: 1949 - RNA, 19 nt, Artificial Sequence
  Synthetic
agauaaacccuuaaagaca

SEQ ID NO: 1950 - RNA, 19 nt, Artificial Sequence
  Synthetic
cagugaaugugaagaaaga

SEQ ID NO: 1951 - RNA, 19 nt, Artificial Sequence
  Synthetic
gaggauaauuugagugagu

SEQ ID NO: 1952 - RNA, 19 nt, Artificial Sequence
  Synthetic
ccaagaacgagaaggaaga

SEQ ID NO: 1953 - RNA, 19 nt, Artificial Sequence
  Synthetic
aagccaaacuguugcacua

SEQ ID NO: 1954 - RNA, 19 nt, Artificial Sequence
  Synthetic
caaagaagauaaacccuua

SEQ ID NO: 1955 - RNA, 19 nt, Artificial Sequence
  Synthetic
gaacugagaagaaggaaaa

SEQ ID NO: 1956 - RNA, 19 nt, Artificial Sequence
  Synthetic
cgagagaaguuuaaagaac

SEQ ID NO: 1957 - RNA, 19 nt, Artificial Sequence
  Synthetic
guacuuacacugugaaauu

SEQ ID NO: 1958 - RNA, 19 nt, Artificial Sequence
  Synthetic
cuaaagaaacagaucacaa

SEQ ID NO: 1959 - RNA, 19 nt, Artificial Sequence
  Synthetic
ccaaagaacuuaaggauuu

SEQ ID NO: 1960 - RNA, 19 nt, Artificial Sequence
  Synthetic
ccagccaagaccagaaaua

SEQ ID NO: 1961 - RNA, 19 nt, Artificial Sequence
  Synthetic
cccaaagaacuuaaggauu

SEQ ID NO: 1962 - RNA, 19 nt, Artificial Sequence
  Synthetic
gcccaaagaacuuaaggau

SEQ ID NO: 1963 - RNA, 19 nt, Artificial Sequence
  Synthetic
cagccaagaccagaaauaa

SEQ ID NO: 1964 - RNA, 19 nt, Artificial Sequence
  Synthetic
ccaccugcccaaagaacuu

SEQ ID NO: 1965 - RNA, 19 nt, Artificial Sequence
  Synthetic
cuuaaggauuucugcaagu

SEQ ID NO: 1966 - RNA, 19 nt, Artificial Sequence
  Synthetic
gaaauaaacagccgaugcu

SEQ ID NO: 1967 - RNA, 19 nt, Artificial Sequence
  Synthetic
guccgaaguuggccacauu

SEQ ID NO: 1968 - RNA, 19 nt, Artificial Sequence
  Synthetic
acaugcacaucaucaucaa

SEQ ID NO: 1969 - RNA, 19 nt, Artificial Sequence
  Synthetic
cugcaaguaugagugaaga

SEQ ID NO: 1970 - RNA, 19 nt, Artificial Sequence
  Synthetic
caaagaacuuaaggauuuc

SEQ ID NO: 1971 - RNA, 19 nt, Artificial Sequence
  Synthetic
gaaccauaucugcgcauug

SEQ ID NO: 1972 - RNA, 19 nt, Artificial Sequence
  Synthetic
gccaagaccagaaauaaac

SEQ ID NO: 1973 - RNA, 19 nt, Artificial Sequence
  Synthetic
ccaagaccagaaauaaaca

SEQ ID NO: 1974 - RNA, 19 nt, Artificial Sequence
  Synthetic
ccgccuggguguccucuuu

SEQ ID NO: 1975 - RNA, 19 nt, Artificial Sequence
  Synthetic
uuaaggauuucugcaagua

SEQ ID NO: 1976 - RNA, 19 nt, Artificial Sequence
  Synthetic
ggaaccauaucugcgcauu

SEQ ID NO: 1977 - RNA, 19 nt, Artificial Sequence
  Synthetic
uaaggauuucugcaaguau

SEQ ID NO: 1978 - RNA, 19 nt, Artificial Sequence
  Synthetic
uaggcgggauggcugagaa

SEQ ID NO: 1979 - RNA, 19 nt, Artificial Sequence
  Synthetic
uguggacggcuaaguugua

SEQ ID NO: 1980 - RNA, 19 nt, Artificial Sequence
  Synthetic
aaggauuucugcaaguaug

SEQ ID NO: 1981 - RNA, 19 nt, Artificial Sequence
  Synthetic
ggcuccaccugcccaaaga

SEQ ID NO: 1982 - RNA, 19 nt, Artificial Sequence
  Synthetic
ugccaucccugcagacucu

SEQ ID NO: 1983 - RNA, 19 nt, Artificial Sequence
  Synthetic
aaccauaucugcgcauuga

SEQ ID NO: 1984 - RNA, 19 nt, Artificial Sequence
  Synthetic
cgacaugcacaucaucauc

SEQ ID NO: 1985 - RNA, 19 nt, Artificial Sequence
  Synthetic
ucuuggaccagcucuauga

SEQ ID NO: 1986 - RNA, 19 nt, Artificial Sequence
  Synthetic
caucaacggcgaggacaug

SEQ ID NO: 1987 - RNA, 19 nt, Artificial Sequence
  Synthetic
ccaagaaagcagaggaaau

SEQ ID NO: 1988 - RNA, 19 nt, Artificial Sequence
  Synthetic
gggaugaacagguggcaau

SEQ ID NO: 1989 - RNA, 19 nt, Artificial Sequence
  Synthetic
cgacagagaugcugaaggu

SEQ ID NO: 1990 - RNA, 19 nt, Artificial Sequence
  Synthetic
gaccaagaaagcagaggaa

SEQ ID NO: 1991 - RNA, 19 nt, Artificial Sequence
  Synthetic
agaucgugguacagaagaa

SEQ ID NO: 1992 - RNA, 19 nt, Artificial Sequence
  Synthetic
cagaacugccacugagcua

SEQ ID NO: 1993 - RNA, 19 nt, Artificial Sequence
  Synthetic
cagagaugcugaaggugau

SEQ ID NO: 1994 - RNA, 19 nt, Artificial Sequence
  Synthetic
ggacgagaagaccaagaaa

SEQ ID NO: 1995 - RNA, 19 nt, Artificial Sequence
  Synthetic
cagaugaacugcaaggagu

SEQ ID NO: 1996 - RNA, 19 nt, Artificial Sequence
  Synthetic
cugcaggguaaaugggauu

SEQ ID NO: 1997 - RNA, 19 nt, Artificial Sequence
  Synthetic
gcaagcugcuggagaggga

SEQ ID NO: 1998 - RNA, 19 nt, Artificial Sequence
  Synthetic
gcaaggaguaucaggagga

SEQ ID NO: 1999 - RNA, 19 nt, Artificial Sequence
  Synthetic
acagagaugcugaagguga

SEQ ID NO: 2000 - RNA, 19 nt, Artificial Sequence
  Synthetic
ggguggagccucuguguga

SEQ ID NO: 2001 - RNA, 19 nt, Artificial Sequence
  Synthetic
agaugaacugcaaggagua

SEQ ID NO: 2002 - RNA, 19 nt, Artificial Sequence
  Synthetic
caguggaggucccggauga

SEQ ID NO: 2003 - RNA, 19 nt, Artificial Sequence
  Synthetic
ggugcuucuuugaggauga

SEQ ID NO: 2004 - RNA, 19 nt, Artificial Sequence
  Synthetic
ccggaugaggcgacaauuu

SEQ ID NO: 2005 - RNA, 19 nt, Artificial Sequence
  Synthetic
gaacugccacugagcuaaa

SEQ ID NO: 2006 - RNA, 19 nt, Artificial Sequence
  Synthetic
agauggacgagaagaccaa

SEQ ID NO: 2007 - RNA, 19 nt, Artificial Sequence
  Synthetic
ccacaacacucaucuguca

SEQ ID NO: 2008 - RNA, 19 nt, Artificial Sequence
  Synthetic
ccacugagcuaaagauggu

SEQ ID NO: 2009 - RNA, 19 nt, Artificial Sequence
  Synthetic
agaggagccuggugcugaa

SEQ ID NO: 2010 - RNA, 19 nt, Artificial Sequence
  Synthetic
gggcaucuccauugcugaa

SEQ ID NO: 2011 - RNA, 19 nt, Artificial Sequence
  Synthetic
augaacagguggcaaugaa

SEQ ID NO: 2012 - RNA, 19 nt, Artificial Sequence
  Synthetic
ccugaggccucuuggaacu

SEQ ID NO: 2013 - RNA, 19 nt, Artificial Sequence
  Synthetic
ccacauccacauucuguua

SEQ ID NO: 2014 - RNA, 19 nt, Artificial Sequence
  Synthetic
cggaugaggcgacaauuuu

SEQ ID NO: 2015 - RNA, 19 nt, Artificial Sequence
  Synthetic
ggaugaugucaaugaguuc

SEQ ID NO: 2016 - RNA, 19 nt, Artificial Sequence
  Synthetic
cugaggauuaccagcgauu

SEQ ID NO: 2017 - RNA, 19 nt, Artificial Sequence
  Synthetic
gaagagaguucaagggaca

SEQ ID NO: 2018 - RNA, 19 nt, Artificial Sequence
  Synthetic
ugugaaugcuugaguaaua

SEQ ID NO: 2019 - RNA, 19 nt, Artificial Sequence
  Synthetic
gggaaguauuauuggauau

SEQ ID NO: 2020 - RNA, 19 nt, Artificial Sequence
  Synthetic
gaacaaagacaauucguua

SEQ ID NO: 2021 - RNA, 19 nt, Artificial Sequence
  Synthetic
aagacaaagcugagaggaa

SEQ ID NO: 2022 - RNA, 19 nt, Artificial Sequence
  Synthetic
cgauauaggaugacaacau

SEQ ID NO: 2023 - RNA, 19 nt, Artificial Sequence
  Synthetic
agaagaagcgcaacggaaa

SEQ ID NO: 2024 - RNA, 19 nt, Artificial Sequence
  Synthetic
gaacaauaucucagcaaau

SEQ ID NO: 2025 - RNA, 19 nt, Artificial Sequence
  Synthetic
gggaaauggcugcaagcaa

SEQ ID NO: 2026 - RNA, 19 nt, Artificial Sequence
  Synthetic
gcaaagagcgauucaagaa

SEQ ID NO: 2027 - RNA, 19 nt, Artificial Sequence
  Synthetic
cauccaaagcauagaaaga

SEQ ID NO: 2028 - RNA, 19 nt, Artificial Sequence
  Synthetic
gcucauagugaauugguaa

SEQ ID NO: 2029 - RNA, 19 nt, Artificial Sequence
  Synthetic
gcuguuaacuguacacaaa

SEQ ID NO: 2030 - RNA, 19 nt, Artificial Sequence
  Synthetic
agaaauaccaguagacaga

SEQ ID NO: 2031 - RNA, 19 nt, Artificial Sequence
  Synthetic
cagcaguugcagagagauu

SEQ ID NO: 2032 - RNA, 19 nt, Artificial Sequence
  Synthetic
aaucgaagcuuacaagaaa

SEQ ID NO: 2033 - RNA, 19 nt, Artificial Sequence
  Synthetic
gaaauauuaaccugggaaa

SEQ ID NO: 2034 - RNA, 19 nt, Artificial Sequence
  Synthetic
cagaaaauguggaugaauu

SEQ ID NO: 2035 - RNA, 19 nt, Artificial Sequence
  Synthetic
cagaugaaaucaagcgaga

SEQ ID NO: 2036 - RNA, 19 nt, Artificial Sequence
  Synthetic
aagcugagaggaagagaaa

SEQ ID NO: 2037 - RNA, 19 nt, Artificial Sequence
  Synthetic
acucaguggauuagaacaa

SEQ ID NO: 2038 - RNA, 19 nt, Artificial Sequence
  Synthetic
caagaaaccuggauuaaca

SEQ ID NO: 2039 - RNA, 19 nt, Artificial Sequence
  Synthetic
cagaagaagcgcaacggaa

SEQ ID NO: 2040 - RNA, 19 nt, Artificial Sequence
  Synthetic
cgucggagcuagagccaga

SEQ ID NO: 2041 - RNA, 19 nt, Artificial Sequence
  Synthetic
aaagauaucuagaagguga

SEQ ID NO: 2042 - RNA, 19 nt, Artificial Sequence
  Synthetic
ggaagagcauguaguaaca

SEQ ID NO: 2043 - RNA, 19 nt, Artificial Sequence
  Synthetic
guucaagggacaaagacaa

SEQ ID NO: 2044 - RNA, 19 nt, Artificial Sequence
  Synthetic
ggaaagaaggagaaaggaa

SEQ ID NO: 2045 - RNA, 19 nt, Artificial Sequence
  Synthetic
gaaagaaggagaaaggaaa

SEQ ID NO: 2046 - RNA, 19 nt, Artificial Sequence
  Synthetic
cggaggaacuugauacuaa

SEQ ID NO: 2047 - RNA, 19 nt, Artificial Sequence
  Synthetic
uaaugaaacucccgaaaua

SEQ ID NO: 2048 - RNA, 19 nt, Artificial Sequence
  Synthetic
gcucuuguccugagaaaua

SEQ ID NO: 2049 - RNA, 19 nt, Artificial Sequence
  Synthetic
cagacaggcuuaagcuaaa

SEQ ID NO: 2050 - RNA, 19 nt, Artificial Sequence
  Synthetic
gaaggagaaaggaaagaaa

SEQ ID NO: 2051 - RNA, 19 nt, Artificial Sequence
  Synthetic
gcaaguagacaaauggaau

SEQ ID NO: 2052 - RNA, 19 nt, Artificial Sequence
  Synthetic
ggguguagcaaguagacaa

SEQ ID NO: 2053 - RNA, 19 nt, Artificial Sequence
  Synthetic
guuaagaagggaaagcaua

SEQ ID NO: 2054 - RNA, 19 nt, Artificial Sequence
  Synthetic
gcagacaggcuuaagcuaa

SEQ ID NO: 2055 - RNA, 19 nt, Artificial Sequence
  Synthetic
gagaagagguggcaaugau

SEQ ID NO: 2056 - RNA, 19 nt, Artificial Sequence
  Synthetic
ggaugugagugggaggaaa

SEQ ID NO: 2057 - RNA, 19 nt, Artificial Sequence
  Synthetic
uuaagaagggaaagcauaa

SEQ ID NO: 2058 - RNA, 19 nt, Artificial Sequence
  Synthetic
gccaggaacuugagugaca

SEQ ID NO: 2059 - RNA, 19 nt, Artificial Sequence
  Synthetic
aauaaauaccgcacacaaa

SEQ ID NO: 2060 - RNA, 19 nt, Artificial Sequence
  Synthetic
cggcagagucgguccagaa

SEQ ID NO: 2061 - RNA, 19 nt, Artificial Sequence
  Synthetic
ggaggaacuugauacuaaa

SEQ ID NO: 2062 - RNA, 19 nt, Artificial Sequence
  Synthetic
guacauaguucccaagcuu

SEQ ID NO: 2063 - RNA, 19 nt, Artificial Sequence
  Synthetic
acucggaaccugaaggauu

SEQ ID NO: 2064 - RNA, 19 nt, Artificial Sequence
  Synthetic
gcuaaugaaacucccgaaa

SEQ ID NO: 2065 - RNA, 19 nt, Artificial Sequence
  Synthetic
cggagacuuucuuggcaaa

SEQ ID NO: 2066 - RNA, 19 nt, Artificial Sequence
  Synthetic
uaacaauccuagacugaga

SEQ ID NO: 2067 - RNA, 19 nt, Artificial Sequence
  Synthetic
ccuaacaauccuagacuga

SEQ ID NO: 2068 - RNA, 19 nt, Artificial Sequence
  Synthetic
gguguagcaaguagacaaa

SEQ ID NO: 2069 - RNA, 19 nt, Artificial Sequence
  Synthetic
gggaggacccugaggauac

SEQ ID NO: 2070 - RNA, 19 nt, Artificial Sequence
  Synthetic
ccaaagggcaggagcaaug

SEQ ID NO: 2071 - RNA, 19 nt, Artificial Sequence
  Synthetic
ggacagcgcuggcaugaga

SEQ ID NO: 2072 - RNA, 19 nt, Artificial Sequence
  Synthetic
gcuaauaaaacucccgaaa

SEQ ID NO: 2073 - RNA, 19 nt, Artificial Sequence
  Synthetic
aggacauugaugagcgcua

SEQ ID NO: 2074 - RNA, 19 nt, Artificial Sequence
  Synthetic
acaagaagaugguggagaa

SEQ ID NO: 2075 - RNA, 19 nt, Artificial Sequence
  Synthetic
gcuggaagcucauggacaa

SEQ ID NO: 2076 - RNA, 19 nt, Artificial Sequence
  Synthetic
ucaaaguggugaaaugaaa

SEQ ID NO: 2077 - RNA, 19 nt, Artificial Sequence
  Synthetic
cguaugaagcaauguauaa

SEQ ID NO: 2078 - RNA, 19 nt, Artificial Sequence
  Synthetic
cuggacaggaagagaauua

SEQ ID NO: 2079 - RNA, 19 nt, Artificial Sequence
  Synthetic
ggagacacauuucggauua

SEQ ID NO: 2080 - RNA, 19 nt, Artificial Sequence
  Synthetic
aaagaauguaugaggagaa

SEQ ID NO: 2081 - RNA, 19 nt, Artificial Sequence
  Synthetic
acccaaagcuggcgcuaaa

SEQ ID NO: 2082 - RNA, 19 nt, Artificial Sequence
  Synthetic
agacaaucccucacaauaa

SEQ ID NO: 2083 - RNA, 19 nt, Artificial Sequence
  Synthetic
ggaacauucuccagacaau

SEQ ID NO: 2084 - RNA, 19 nt, Artificial Sequence
  Synthetic
ccaggaacaauaugaauua

SEQ ID NO: 2085 - RNA, 19 nt, Artificial Sequence
  Synthetic
ggguguuuauggagaauuu

SEQ ID NO: 2086 - RNA, 19 nt, Artificial Sequence
  Synthetic
gagaagugcuggaagcuca

SEQ ID NO: 2087 - RNA, 19 nt, Artificial Sequence
  Synthetic
ccagaaauucauucacaaa

SEQ ID NO: 2088 - RNA, 19 nt, Artificial Sequence
  Synthetic
uggagaauuugaugaagaa

SEQ ID NO: 2089 - RNA, 19 nt, Artificial Sequence
  Synthetic
gggaaaagaaagaauguau

SEQ ID NO: 2090 - RNA, 19 nt, Artificial Sequence
  Synthetic
ggagacacuuggagaaaau

SEQ ID NO: 2091 - RNA, 19 nt, Artificial Sequence
  Synthetic
ucgagaaccucaugaguca

SEQ ID NO: 2092 - RNA, 19 nt, Artificial Sequence
  Synthetic
cugcggaauuuuggagaaa

SEQ ID NO: 2093 - RNA, 19 nt, Artificial Sequence
  Synthetic
uggcagaacuaaaaggaau

SEQ ID NO: 2094 - RNA, 19 nt, Artificial Sequence
  Synthetic
aaucaacucugaacggaaa

SEQ ID NO: 2095 - RNA, 19 nt, Artificial Sequence
  Synthetic
cgucugggucagugggcua

SEQ ID NO: 2096 - RNA, 19 nt, Artificial Sequence
  Synthetic
aaaugaggaugauggguau

SEQ ID NO: 2097 - RNA, 19 nt, Artificial Sequence
  Synthetic
ccacaugcuggcagaacua

SEQ ID NO: 2098 - RNA, 19 nt, Artificial Sequence
  Synthetic
ucacaaaccuggcaguuau

SEQ ID NO: 2099 - RNA, 19 nt, Artificial Sequence
  Synthetic
uggacaagguggugcgguu

SEQ ID NO: 2100 - RNA, 19 nt, Artificial Sequence
  Synthetic
gugaagaggacacagagua

SEQ ID NO: 2101 - RNA, 19 nt, Artificial Sequence
  Synthetic
ucaaagugacccaggaaca

SEQ ID NO: 2102 - RNA, 19 nt, Artificial Sequence
  Synthetic
gaaucaacucugaacggaa

SEQ ID NO: 2103 - RNA, 19 nt, Artificial Sequence
  Synthetic
ccagaaagcuuuggucauu

SEQ ID NO: 2104 - RNA, 19 nt, Artificial Sequence
  Synthetic
gaagagagccuuagagaua

SEQ ID NO: 2105 - RNA, 19 nt, Artificial Sequence
  Synthetic
gcauauauuuaaagggaga

SEQ ID NO: 2106 - RNA, 19 nt, Artificial Sequence
  Synthetic
aggaagaugaugaugaaua

SEQ ID NO: 2107 - RNA, 19 nt, Artificial Sequence
  Synthetic
ccuuggaagugaagaauau

SEQ ID NO: 2108 - RNA, 19 nt, Artificial Sequence
  Synthetic
ggauuugucuugacgguaa

SEQ ID NO: 2109 - RNA, 19 nt, Artificial Sequence
  Synthetic
aagcacgacuacagaaaua

SEQ ID NO: 2110 - RNA, 19 nt, Artificial Sequence
  Synthetic
ggagagaauguaugaagaa

SEQ ID NO: 2111 - RNA, 19 nt, Artificial Sequence
  Synthetic
ggaaaaugucgaugcaaaa

SEQ ID NO: 2112 - RNA, 19 nt, Artificial Sequence
  Synthetic
ggucaauuccagggagaua

SEQ ID NO: 2113 - RNA, 19 nt, Artificial Sequence
  Synthetic
cagaaauucaccacagaaa

SEQ ID NO: 2114 - RNA, 19 nt, Artificial Sequence
  Synthetic
gggaaggauuuuaucuuua

SEQ ID NO: 2115 - RNA, 19 nt, Artificial Sequence
  Synthetic
cuuggaagcucauggacaa

SEQ ID NO: 2116 - RNA, 19 nt, Artificial Sequence
  Synthetic
ccugaugggaggaguuaua

SEQ ID NO: 2117 - RNA, 19 nt, Artificial Sequence
  Synthetic
ggguauuauugaugcuauu

SEQ ID NO: 2118 - RNA, 19 nt, Artificial Sequence
  Synthetic
gugcagagaaugacaaaga

SEQ ID NO: 2119 - RNA, 19 nt, Artificial Sequence
  Synthetic
cuacagaaauauagcacca

SEQ ID NO: 2120 - RNA, 19 nt, Artificial Sequence
  Synthetic
gagaagacuuggaagcuca

SEQ ID NO: 2121 - RNA, 19 nt, Artificial Sequence
  Synthetic
uagagauagcccagaauaa

SEQ ID NO: 2122 - RNA, 19 nt, Artificial Sequence
  Synthetic
ugauuaagguaguagugua

SEQ ID NO: 2123 - RNA, 19 nt, Artificial Sequence
  Synthetic
ggugagaaaacaagauaaa

SEQ ID NO: 2124 - RNA, 19 nt, Artificial Sequence
  Synthetic
uggaaaaugucgaugcaaa

SEQ ID NO: 2125 - RNA, 19 nt, Artificial Sequence
  Synthetic
agaggaagaugaugaugaa

SEQ ID NO: 2126 - RNA, 19 nt, Artificial Sequence
  Synthetic
uggcagaaaucaaagcaau

SEQ ID NO: 2127 - RNA, 19 nt, Artificial Sequence
  Synthetic
caguagaggaagaugauga

SEQ ID NO: 2128 - RNA, 19 nt, Artificial Sequence
  Synthetic
gcucauggacaaaguggua

SEQ ID NO: 2129 - RNA, 19 nt, Artificial Sequence
  Synthetic
gaagaaagccacagccuga

SEQ ID NO: 2130 - RNA, 19 nt, Artificial Sequence
  Synthetic
uaagauuugugcagagaau

SEQ ID NO: 2131 - RNA, 19 nt, Artificial Sequence
  Synthetic
uugcaaaacucaugggaga

SEQ ID NO: 2132 - RNA, 19 nt, Artificial Sequence
  Synthetic
aagaaggcaaggagagaau

SEQ ID NO: 2133 - RNA, 19 nt, Artificial Sequence
  Synthetic
gugguaagacugugccaaa

SEQ ID NO: 2134 - RNA, 19 nt, Artificial Sequence
  Synthetic
gcaacaaggaugugaagau

SEQ ID NO: 2135 - RNA, 19 nt, Artificial Sequence
  Synthetic
gcugggaggccgugaguau

SEQ ID NO: 2136 - RNA, 19 nt, Artificial Sequence
  Synthetic
acaaggaugugaagauuga

SEQ ID NO: 2137 - RNA, 19 nt, Artificial Sequence
  Synthetic
caacaaggaugugaagauu

SEQ ID NO: 2138 - RNA, 19 nt, Artificial Sequence
  Synthetic
ccagaaaugcccagccgaa

SEQ ID NO: 2139 - RNA, 19 nt, Artificial Sequence
  Synthetic
gagacaagccaggcaguua

SEQ ID NO: 2140 - RNA, 19 nt, Artificial Sequence
  Synthetic
guugugaaaccgaaauaaa

SEQ ID NO: 2141 - RNA, 19 nt, Artificial Sequence
  Synthetic
gaacagcagugaccaggaa

SEQ ID NO: 2142 - RNA, 19 nt, Artificial Sequence
  Synthetic
ggccaacacuccucaagaa

SEQ ID NO: 2143 - RNA, 19 nt, Artificial Sequence
  Synthetic
cagaaaugcccagccgaaa

SEQ ID NO: 2144 - RNA, 19 nt, Artificial Sequence
  Synthetic
cgaaagugagacuccuaaa

SEQ ID NO: 2145 - RNA, 19 nt, Artificial Sequence
  Synthetic
cacaccuucuggagggaaa

SEQ ID NO: 2146 - RNA, 19 nt, Artificial Sequence
  Synthetic
gggaaaguacuguggacac

SEQ ID NO: 2147 - RNA, 19 nt, Artificial Sequence
  Synthetic
gggacuuucuacucaucua

SEQ ID NO: 2148 - RNA, 19 nt, Artificial Sequence
  Synthetic
ccuaugaugagguccaaga

SEQ ID NO: 2149 - RNA, 19 nt, Artificial Sequence
  Synthetic
ccgaaagugagacuccuaa

SEQ ID NO: 2150 - RNA, 19 nt, Artificial Sequence
  Synthetic
gcagugggccaucggcuau

SEQ ID NO: 2151 - RNA, 19 nt, Artificial Sequence
  Synthetic
gaccaucccugccaacaaa

SEQ ID NO: 2152 - RNA, 19 nt, Artificial Sequence
  Synthetic
caacacuccucaagaacug

SEQ ID NO: 2153 - RNA, 19 nt, Artificial Sequence
  Synthetic
ccaggaaggcagggaguug

SEQ ID NO: 2154 - RNA, 19 nt, Artificial Sequence
  Synthetic
ugccaagccuggucuguca

SEQ ID NO: 2155 - RNA, 19 nt, Artificial Sequence
  Synthetic
agaaaugcccagccgaaag

SEQ ID NO: 2156 - RNA, 19 nt, Artificial Sequence
  Synthetic
ccgugaguaucuaccaguu

SEQ ID NO: 2157 - RNA, 19 nt, Artificial Sequence
  Synthetic
gagcaacaaggaugugaag

SEQ ID NO: 2158 - RNA, 19 nt, Artificial Sequence
  Synthetic
cauuugagcucugcaagau

SEQ ID NO: 2159 - RNA, 19 nt, Artificial Sequence
  Synthetic
ucaucuaccuggccaaucu

SEQ ID NO: 2160 - RNA, 19 nt, Artificial Sequence
  Synthetic
gaaaugcccagccgaaagu

SEQ ID NO: 2161 - RNA, 19 nt, Artificial Sequence
  Synthetic
gagagcaacaaggauguga

SEQ ID NO: 2162 - RNA, 19 nt, Artificial Sequence
  Synthetic
ugcaagaucugugcugaga

SEQ ID NO: 2163 - RNA, 19 nt, Artificial Sequence
  Synthetic
ccaagccuggucugucaaa

SEQ ID NO: 2164 - RNA, 19 nt, Artificial Sequence
  Synthetic
guucaagggugcaagagaa

SEQ ID NO: 2165 - RNA, 19 nt, Artificial Sequence
  Synthetic
ccgcgaacucaaagaacua

SEQ ID NO: 2166 - RNA, 19 nt, Artificial Sequence
  Synthetic
cuauaaagcucaucuccaa

SEQ ID NO: 2167 - RNA, 19 nt, Artificial Sequence
  Synthetic
gauaaacaucuuaggugaa

SEQ ID NO: 2168 - RNA, 19 nt, Artificial Sequence
  Synthetic
cugaaaucccugagcguuu

SEQ ID NO: 2169 - RNA, 19 nt, Artificial Sequence
  Synthetic
ccagaucagacaagauaua

SEQ ID NO: 2170 - RNA, 19 nt, Artificial Sequence
  Synthetic
ccauaugagagcuggaaaa

SEQ ID NO: 2171 - RNA, 19 nt, Artificial Sequence
  Synthetic
acaagcaaacaaagcgaaa

SEQ ID NO: 2172 - RNA, 19 nt, Artificial Sequence
  Synthetic
gacaagauauagaccguau

SEQ ID NO: 2173 - RNA, 19 nt, Artificial Sequence
  Synthetic
agagagacuuacaggcuca

SEQ ID NO: 2174 - RNA, 19 nt, Artificial Sequence
  Synthetic
uauuaugccuccacagcaa

SEQ ID NO: 2175 - RNA, 19 nt, Artificial Sequence
  Synthetic
gcgaagauuuccuggacac

SEQ ID NO: 2176 - RNA, 19 nt, Artificial Sequence
  Synthetic
auaaugaagaagaacggua

SEQ ID NO: 2177 - RNA, 19 nt, Artificial Sequence
  Synthetic
ggggugagcuguuugcaaa

SEQ ID NO: 2178 - RNA, 19 nt, Artificial Sequence
  Synthetic
cagacaagauauagaccgu

SEQ ID NO: 2179 - RNA, 19 nt, Artificial Sequence
  Synthetic
cuccaaacaagcaaacaaa

SEQ ID NO: 2180 - RNA, 19 nt, Artificial Sequence
  Synthetic
caagggugcaagagaacau

SEQ ID NO: 2181 - RNA, 19 nt, Artificial Sequence
  Synthetic
ggaaugaguccugguauau

SEQ ID NO: 2182 - RNA, 19 nt, Artificial Sequence
  Synthetic
caacaagaaaacacagcaa

SEQ ID NO: 2183 - RNA, 19 nt, Artificial Sequence
  Synthetic
ucaccaucauccugaauau

SEQ ID NO: 2184 - RNA, 19 nt, Artificial Sequence
  Synthetic
uuugggacuuucagauaaa

SEQ ID NO: 2185 - RNA, 19 nt, Artificial Sequence
  Synthetic
uaaugaagaagaacgguau

SEQ ID NO: 2186 - RNA, 19 nt, Artificial Sequence
  Synthetic
acaagaaaacacagcaauu

SEQ ID NO: 2187 - RNA, 19 nt, Artificial Sequence
  Synthetic
cacugaagaucaaggaacu

SEQ ID NO: 2188 - RNA, 19 nt, Artificial Sequence
  Synthetic
ucgcagacgaauuccuaua

SEQ ID NO: 2189 - RNA, 19 nt, Artificial Sequence
  Synthetic
uggugaugaagaaggauuu

SEQ ID NO: 2190 - RNA, 19 nt, Artificial Sequence
  Synthetic
ggacauagcccaagaacag

SEQ ID NO: 2191 - RNA, 19 nt, Artificial Sequence
  Synthetic
ugaaauauauugugcgucu

SEQ ID NO: 2192 - RNA, 19 nt, Artificial Sequence
  Synthetic
aaucagaagcagcaagcaa

SEQ ID NO: 2193 - RNA, 19 nt, Artificial Sequence
  Synthetic
gguuuagugcaaaguauaa

SEQ ID NO: 2194 - RNA, 19 nt, Artificial Sequence
  Synthetic
cagacuugggugaaauaua

SEQ ID NO: 2195 - RNA, 19 nt, Artificial Sequence
  Synthetic
caaugaaggcugugacauc

SEQ ID NO: 2196 - RNA, 19 nt, Artificial Sequence
  Synthetic
ccguauucuucauccuaaa

SEQ ID NO: 2197 - RNA, 19 nt, Artificial Sequence
  Synthetic
ccaaagaacuggguacuca

SEQ ID NO: 2198 - RNA, 19 nt, Artificial Sequence
  Synthetic
agacuugggugaaauauau

SEQ ID NO: 2199 - RNA, 19 nt, Artificial Sequence
  Synthetic
gagcagaucuguucuuuga

SEQ ID NO: 2200 - RNA, 19 nt, Artificial Sequence
  Synthetic
ggugaaauauauugugcgu

SEQ ID NO: 2201 - RNA, 19 nt, Artificial Sequence
  Synthetic
cauggaggguuuagugcuu

SEQ ID NO: 2202 - RNA, 19 nt, Artificial Sequence
  Synthetic
uggaauggaauuggacaua

SEQ ID NO: 2203 - RNA, 19 nt, Artificial Sequence
  Synthetic
aaacagacuugggugaaau

SEQ ID NO: 2204 - RNA, 19 nt, Artificial Sequence
  Synthetic
caucaaugcuaucaucuuu

SEQ ID NO: 2205 - RNA, 19 nt, Artificial Sequence
  Synthetic
cuaucaucuuucacacaaa

SEQ ID NO: 2206 - RNA, 19 nt, Artificial Sequence
  Synthetic
caaagaacuggguacucaa

SEQ ID NO: 2207 - RNA, 19 nt, Artificial Sequence
  Synthetic
caucauaguuugcuuuguu

SEQ ID NO: 2208 - RNA, 19 nt, Artificial Sequence
  Synthetic
aaaacagacuugggugaaa

SEQ ID NO: 2209 - RNA, 19 nt, Artificial Sequence
  Synthetic
gcuaucaucuuucacacaa

SEQ ID NO: 2210 - RNA, 19 nt, Artificial Sequence
  Synthetic
gcugugacaucaaugcuau

SEQ ID NO: 2211 - RNA, 19 nt, Artificial Sequence
  Synthetic
gcacaucauggaggguuua

SEQ ID NO: 2212 - RNA, 19 nt, Artificial Sequence
  Synthetic
gcaagcaacaagcuauuuu

SEQ ID NO: 2213 - RNA, 19 nt, Artificial Sequence
  Synthetic
gaauggaauuggacauagc

SEQ ID NO: 2214 - RNA, 19 nt, Artificial Sequence
  Synthetic
gaucuguucuuugagcuaa

SEQ ID NO: 2215 - RNA, 19 nt, Artificial Sequence
  Synthetic
uauauggacuuucuugcaa

SEQ ID NO: 2216 - RNA, 19 nt, Artificial Sequence
  Synthetic
agaagcagcaagcaacuuu

SEQ ID NO: 2217 - RNA, 19 nt, Artificial Sequence
  Synthetic
ccaccucugcggcgaauca

SEQ ID NO: 2218 - RNA, 19 nt, Artificial Sequence
  Synthetic
gcagcaagcaacuuugacu

SEQ ID NO: 2219 - RNA, 19 nt, Artificial Sequence
  Synthetic
uccauaagcuauuuugguu

SEQ ID NO: 2220 - RNA, 19 nt, Artificial Sequence
  Synthetic
aggaagaggugcugagcua

SEQ ID NO: 2221 - RNA, 19 nt, Artificial Sequence
  Synthetic
ccuacaaagcgaagaauaa

SEQ ID NO: 2222 - RNA, 19 nt, Artificial Sequence
  Synthetic
ggacaagcgcuauggagaa

SEQ ID NO: 2223 - RNA, 19 nt, Artificial Sequence
  Synthetic
ugaaggaccugguggacaa

SEQ ID NO: 2224 - RNA, 19 nt, Artificial Sequence
  Synthetic
acgaggaccuggugagaau

SEQ ID NO: 2225 - RNA, 19 nt, Artificial Sequence
  Synthetic
cagauaggcuagccagaaa

SEQ ID NO: 2226 - RNA, 19 nt, Artificial Sequence
  Synthetic
gcggauaaaccuaugcaua

SEQ ID NO: 2227 - RNA, 19 nt, Artificial Sequence
  Synthetic
guaaagagauccugaccau

SEQ ID NO: 2228 - RNA, 19 nt, Artificial Sequence
  Synthetic
caacaggugaagcggauaa

SEQ ID NO: 2229 - RNA, 19 nt, Artificial Sequence
  Synthetic
agccaaagccugugcaaau

SEQ ID NO: 2230 - RNA, 19 nt, Artificial Sequence
  Synthetic
gguuugaggacaagcgcua

SEQ ID NO: 2231 - RNA, 19 nt, Artificial Sequence
  Synthetic
gagaaaucagccaggaaga

SEQ ID NO: 2232 - RNA, 19 nt, Artificial Sequence
  Synthetic
agaacagccuccaggaaga

SEQ ID NO: 2233 - RNA, 19 nt, Artificial Sequence
  Synthetic
ggacuggaggugagagcuu

SEQ ID NO: 2234 - RNA, 19 nt, Artificial Sequence
  Synthetic
ucgcaaaggcugcugggaa

SEQ ID NO: 2235 - RNA, 19 nt, Artificial Sequence
  Synthetic
uguucgaggaugaggagaa

SEQ ID NO: 2236 - RNA, 19 nt, Artificial Sequence
  Synthetic
aggcuuguccagaggcaaa

SEQ ID NO: 2237 - RNA, 19 nt, Artificial Sequence
  Synthetic
gcagcugucuuuagccaaa

SEQ ID NO: 2238 - RNA, 19 nt, Artificial Sequence
  Synthetic
gauuaaaugugaggaggau

SEQ ID NO: 2239 - RNA, 19 nt, Artificial Sequence
  Synthetic
gcgcagaagugaauggccu

SEQ ID NO: 2240 - RNA, 19 nt, Artificial Sequence
  Synthetic
gcugcaaggccgugguuca

SEQ ID NO: 2241 - RNA, 19 nt, Artificial Sequence
  Synthetic
ccaguugugugcugcauua

SEQ ID NO: 2242 - RNA, 19 nt, Artificial Sequence
  Synthetic
ggauaaaccuaugcauaca

SEQ ID NO: 2243 - RNA, 19 nt, Artificial Sequence
  Synthetic
gugaggaggaggacaugaa

SEQ ID NO: 2244 - RNA, 19 nt, Artificial Sequence
  Synthetic
acagugaggaggaggacau

SEQ ID NO: 2245 - RNA, 19 nt, Artificial Sequence
  Synthetic
ucaaugacacaaugaggua

SEQ ID NO: 2246 - RNA, 19 nt, Artificial Sequence
  Synthetic
caagagauucccaccauua

SEQ ID NO: 2247 - RNA, 19 nt, Artificial Sequence
  Synthetic
cgcaaaggcugcugggaag

SEQ ID NO: 2248 - RNA, 19 nt, Artificial Sequence
  Synthetic
gacaagcgcuauggagaaa

SEQ ID NO: 2249 - RNA, 19 nt, Artificial Sequence
  Synthetic
aggacaagcgcuauggaga

SEQ ID NO: 2250 - RNA, 19 nt, Artificial Sequence
  Synthetic
ggaaguggaaagagagcaa

SEQ ID NO: 2251 - RNA, 19 nt, Artificial Sequence
  Synthetic
ggaaagagagcaaggggaa

SEQ ID NO: 2252 - RNA, 19 nt, Artificial Sequence
  Synthetic
ccugacaccaccagaauaa

SEQ ID NO: 2253 - RNA, 19 nt, Artificial Sequence
  Synthetic
acacagacaucauccggaa

SEQ ID NO: 2254 - RNA, 19 nt, Artificial Sequence
  Synthetic
ggaccauucuccugagugu

SEQ ID NO: 2255 - RNA, 19 nt, Artificial Sequence
  Synthetic
gagcugagcccgacuucua

SEQ ID NO: 2256 - RNA, 19 nt, Artificial Sequence
  Synthetic
gcgugacacugguggacga

SEQ ID NO: 2257 - RNA, 19 nt, Artificial Sequence
  Synthetic
acgcagaacgucaggacca

SEQ ID NO: 2258 - RNA, 19 nt, Artificial Sequence
  Synthetic
gaucgggaguacacagaca

SEQ ID NO: 2259 - RNA, 19 nt, Artificial Sequence
  Synthetic
gcucagaccucuucuacga

SEQ ID NO: 2260 - RNA, 19 nt, Artificial Sequence
  Synthetic
uacaggaaguggaaagaga

SEQ ID NO: 2261 - RNA, 19 nt, Artificial Sequence
  Synthetic
aguacugcgugaagaccaa

SEQ ID NO: 2262 - RNA, 19 nt, Artificial Sequence
  Synthetic
ccuccgugauguacaggaa

SEQ ID NO: 2263 - RNA, 19 nt, Artificial Sequence
  Synthetic
gggaguacacagacaucau

SEQ ID NO: 2264 - RNA, 19 nt, Artificial Sequence
  Synthetic
aagagccggucgagggauu

SEQ ID NO: 2265 - RNA, 19 nt, Artificial Sequence
  Synthetic
uggacgagggcgaucuaua

SEQ ID NO: 2266 - RNA, 19 nt, Artificial Sequence
  Synthetic
ccaugucuguucuggguuu

SEQ ID NO: 2267 - RNA, 19 nt, Artificial Sequence
  Synthetic
gcacagaguggacggauuc

SEQ ID NO: 2268 - RNA, 19 nt, Artificial Sequence
  Synthetic
ucaaggggcugcaggaaga

SEQ ID NO: 2269 - RNA, 19 nt, Artificial Sequence
  Synthetic
gcuuugguuuguuugaaau

SEQ ID NO: 2270 - RNA, 19 nt, Artificial Sequence
  Synthetic
ccaagauguggcacccuaa

SEQ ID NO: 2271 - RNA, 19 nt, Artificial Sequence
  Synthetic
ggacgaugaggaugacucu

SEQ ID NO: 2272 - RNA, 19 nt, Artificial Sequence
  Synthetic
ggaaggaucgggaguacac

SEQ ID NO: 2273 - RNA, 19 nt, Artificial Sequence
  Synthetic
ugaacgagcccaacaccuu

SEQ ID NO: 2274 - RNA, 19 nt, Artificial Sequence
  Synthetic
ggacgagggcgaucuauac

SEQ ID NO: 2275 - RNA, 19 nt, Artificial Sequence
  Synthetic
gguggacgagggcgaucua

SEQ ID NO: 2276 - RNA, 19 nt, Artificial Sequence
  Synthetic
cuccuuagacgacagacua

SEQ ID NO: 2277 - RNA, 19 nt, Artificial Sequence
  Synthetic
ugaucucccuccugaacga

SEQ ID NO: 2278 - RNA, 19 nt, Artificial Sequence
  Synthetic
acugggagguggccaucuu

SEQ ID NO: 2279 - RNA, 19 nt, Artificial Sequence
  Synthetic
ucaccguggccgacucuuu

SEQ ID NO: 2280 - RNA, 19 nt, Artificial Sequence
  Synthetic
ccaagaagcuuuagaaauu

SEQ ID NO: 2281 - RNA, 19 nt, Artificial Sequence
  Synthetic
ccugaaaguuggaaugaaa

SEQ ID NO: 2282 - RNA, 19 nt, Artificial Sequence
  Synthetic
gcuuggaguuggaaggaaa

SEQ ID NO: 2283 - RNA, 19 nt, Artificial Sequence
  Synthetic
aggaaagaguuauggguuu

SEQ ID NO: 2284 - RNA, 19 nt, Artificial Sequence
  Synthetic
ggacuuaaauaaagcaaga

SEQ ID NO: 2285 - RNA, 19 nt, Artificial Sequence
  Synthetic
ggauaaagaaagagaauuc

SEQ ID NO: 2286 - RNA, 19 nt, Artificial Sequence
  Synthetic
gggaaauccaagagauauu

SEQ ID NO: 2287 - RNA, 19 nt, Artificial Sequence
  Synthetic
ccgaagaacugaaggaugu

SEQ ID NO: 2288 - RNA, 19 nt, Artificial Sequence
  Synthetic
ccuaauggaaguagcauaa

SEQ ID NO: 2289 - RNA, 19 nt, Artificial Sequence
  Synthetic
cuggaagaguauugggcaa

SEQ ID NO: 2290 - RNA, 19 nt, Artificial Sequence
  Synthetic
ggaugugauuguuggaaau

SEQ ID NO: 2291 - RNA, 19 nt, Artificial Sequence
  Synthetic
aaugauugcuggagggaau

SEQ ID NO: 2292 - RNA, 19 nt, Artificial Sequence
  Synthetic
ggagaaugguaauguucaa

SEQ ID NO: 2293 - RNA, 19 nt, Artificial Sequence
  Synthetic
ggucauaauucaacacaga

SEQ ID NO: 2294 - RNA, 19 nt, Artificial Sequence
  Synthetic
cggcagcaauugaggaaga

SEQ ID NO: 2295 - RNA, 19 nt, Artificial Sequence
  Synthetic
agccuaaauuugagaagaa

SEQ ID NO: 2296 - RNA, 19 nt, Artificial Sequence
  Synthetic
aagggaaauccaagagaua

SEQ ID NO: 2297 - RNA, 19 nt, Artificial Sequence
  Synthetic
caacaacaacagaggauuu

SEQ ID NO: 2298 - RNA, 19 nt, Artificial Sequence
  Synthetic
agaagguacuuguggaaaa

SEQ ID NO: 2299 - RNA, 19 nt, Artificial Sequence
  Synthetic
agaaugaagaccugaggaa

SEQ ID NO: 2300 - RNA, 19 nt, Artificial Sequence
  Synthetic
caacagaggauuuggcuga

SEQ ID NO: 2301 - RNA, 19 nt, Artificial Sequence
  Synthetic
aaaugaauguggacaacua

SEQ ID NO: 2302 - RNA, 19 nt, Artificial Sequence
  Synthetic
gaaagagggaugaagaaga

SEQ ID NO: 2303 - RNA, 19 nt, Artificial Sequence
  Synthetic
augaaagugcugaggagaa

SEQ ID NO: 2304 - RNA, 19 nt, Artificial Sequence
  Synthetic
ggguaaaccaggugaaaug

SEQ ID NO: 2305 - RNA, 19 nt, Artificial Sequence
  Synthetic
ucauaugccaguuggauua

SEQ ID NO: 2306 - RNA, 19 nt, Artificial Sequence
  Synthetic
gcagaagguacuuguggaa

SEQ ID NO: 2307 - RNA, 19 nt, Artificial Sequence
  Synthetic
gggacagaaacgacacaaa

SEQ ID NO: 2308 - RNA, 19 nt, Artificial Sequence
  Synthetic
cuggauaaagaaagagaau

SEQ ID NO: 2309 - RNA, 19 nt, Artificial Sequence
  Synthetic
uugcugauguggagacuaa

SEQ ID NO: 2310 - RNA, 19 nt, Artificial Sequence
  Synthetic
caaagaugauagugacaau

SEQ ID NO: 2311 - RNA, 19 nt, Artificial Sequence
  Synthetic
gcacugagacacuggagaa

SEQ ID NO: 2312 - RNA, 19 nt, Artificial Sequence
  Synthetic
uggcagaacagaagcagaa

SEQ ID NO: 2313 - RNA, 19 nt, Artificial Sequence
  Synthetic
cagcugagucuguugguaa

SEQ ID NO: 2314 - RNA, 19 nt, Artificial Sequence
  Synthetic
cugagacacuggagaagaa

SEQ ID NO: 2315 - RNA, 19 nt, Artificial Sequence
  Synthetic
gggcaaggaggcuaaacaa

SEQ ID NO: 2316 - RNA, 19 nt, Artificial Sequence
  Synthetic
gcagagaggaagaucauga

SEQ ID NO: 2317 - RNA, 19 nt, Artificial Sequence
  Synthetic
ggaaagaauugggauguga

SEQ ID NO: 2318 - RNA, 19 nt, Artificial Sequence
  Synthetic
agaagggaguugagaagga

SEQ ID NO: 2319 - RNA, 19 nt, Artificial Sequence
  Synthetic
caaaggagguucucaguca

SEQ ID NO: 2320 - RNA, 19 nt, Artificial Sequence
  Synthetic
ccgauuggccaguguaauu

SEQ ID NO: 2321 - RNA, 19 nt, Artificial Sequence
  Synthetic
gcacaaggauaaauggaaa

SEQ ID NO: 2322 - RNA, 19 nt, Artificial Sequence
  Synthetic
agaagaaggaggagcgaua

SEQ ID NO: 2323 - RNA, 19 nt, Artificial Sequence
  Synthetic
agaagaagucugagaagaa

SEQ ID NO: 2324 - RNA, 19 nt, Artificial Sequence
  Synthetic
aagcagaagcacaaggaua

SEQ ID NO: 2325 - RNA, 19 nt, Artificial Sequence
  Synthetic
gcgaggaugaggagagcaa

SEQ ID NO: 2326 - RNA, 19 nt, Artificial Sequence
  Synthetic
gcggaagagggcagugaaa

SEQ ID NO: 2327 - RNA, 19 nt, Artificial Sequence
  Synthetic
agcagaagcacaaggauaa

SEQ ID NO: 2328 - RNA, 19 nt, Artificial Sequence
  Synthetic
ggaagagggcagugaaagu

SEQ ID NO: 2329 - RNA, 19 nt, Artificial Sequence
  Synthetic
uguauaauccucagagcaa

SEQ ID NO: 2330 - RNA, 19 nt, Artificial Sequence
  Synthetic
gagaagaagucugagaaga

SEQ ID NO: 2331 - RNA, 19 nt, Artificial Sequence
  Synthetic
acacagaccugcagaucuu

SEQ ID NO: 2332 - RNA, 19 nt, Artificial Sequence
  Synthetic
ggcagaagcagaagcacaa

SEQ ID NO: 2333 - RNA, 19 nt, Artificial Sequence
  Synthetic
gcaacgagggugacaguga

SEQ ID NO: 2334 - RNA, 19 nt, Artificial Sequence
  Synthetic
ccgcauguguggugagugu

SEQ ID NO: 2335 - RNA, 19 nt, Artificial Sequence
  Synthetic
gggagugcagagagaaaga

SEQ ID NO: 2336 - RNA, 19 nt, Artificial Sequence
  Synthetic
cagugaaagugaagcaugu

SEQ ID NO: 2337 - RNA, 19 nt, Artificial Sequence
  Synthetic
gggagaagaagucugagaa

SEQ ID NO: 2338 - RNA, 19 nt, Artificial Sequence
  Synthetic
ugucgggagugcagagaga

SEQ ID NO: 2339 - RNA, 19 nt, Artificial Sequence
  Synthetic
ccaacaagauccggcagaa

SEQ ID NO: 2340 - RNA, 19 nt, Artificial Sequence
  Synthetic
gcacccgccuucaggaaau

SEQ ID NO: 2341 - RNA, 19 nt, Artificial Sequence
  Synthetic
aggauaaagaugagagaaa

SEQ ID NO: 2342 - RNA, 19 nt, Artificial Sequence
  Synthetic
gcuaacagcaauaaagaua

SEQ ID NO: 2343 - RNA, 19 nt, Artificial Sequence
  Synthetic
gaugagagaaagugguuua

SEQ ID NO: 2344 - RNA, 19 nt, Artificial Sequence
  Synthetic
uaauacaagucgaggauuu

SEQ ID NO: 2345 - RNA, 19 nt, Artificial Sequence
  Synthetic
caccagacguagagaagaa

SEQ ID NO: 2346 - RNA, 19 nt, Artificial Sequence
  Synthetic
gcaaagagagcucgacuua

SEQ ID NO: 2347 - RNA, 19 nt, Artificial Sequence
  Synthetic
cugccuacaucuagugaaa

SEQ ID NO: 2348 - RNA, 19 nt, Artificial Sequence
  Synthetic
uuggauagcuuuagucaaa

SEQ ID NO: 2349 - RNA, 19 nt, Artificial Sequence
  Synthetic
agcaauagcugauggaaga

SEQ ID NO: 2350 - RNA, 19 nt, Artificial Sequence
  Synthetic
gauaaggaaagaagagaga

SEQ ID NO: 2351 - RNA, 19 nt, Artificial Sequence
  Synthetic
gcaacucguuucaggcaaa

SEQ ID NO: 2352 - RNA, 19 nt, Artificial Sequence
  Synthetic
aaggaagacuacaaugaaa

SEQ ID NO: 2353 - RNA, 19 nt, Artificial Sequence
  Synthetic
gggaagugaggauuggaua

SEQ ID NO: 2354 - RNA, 19 nt, Artificial Sequence
  Synthetic
gauaaagaugagagaaagu

SEQ ID NO: 2355 - RNA, 19 nt, Artificial Sequence
  Synthetic
acguagagaagaaggaaga

SEQ ID NO: 2356 - RNA, 19 nt, Artificial Sequence
  Synthetic
gaagaagaucucagcguuu

SEQ ID NO: 2357 - RNA, 19 nt, Artificial Sequence
  Synthetic
ucagaaaccugcacuguua

SEQ ID NO: 2358 - RNA, 19 nt, Artificial Sequence
  Synthetic
gagagaagagagacaaaga

SEQ ID NO: 2359 - RNA, 19 nt, Artificial Sequence
  Synthetic
gaagauuccugcugauuuu

SEQ ID NO: 2360 - RNA, 19 nt, Artificial Sequence
  Synthetic
agacaaagaucacuacaga

SEQ ID NO: 2361 - RNA, 19 nt, Artificial Sequence
  Synthetic
ggaaagaagagagaagaga

SEQ ID NO: 2362 - RNA, 19 nt, Artificial Sequence
  Synthetic
ggaguaauucaguuguuua

SEQ ID NO: 2363 - RNA, 19 nt, Artificial Sequence
  Synthetic
agaaagugguuuaaaguac

SEQ ID NO: 2364 - RNA, 19 nt, Artificial Sequence
  Synthetic
ccagagagcacauuaucaa

SEQ ID NO: 2365 - RNA, 19 nt, Artificial Sequence
  Synthetic
gaacaaaacagggaguaaa

SEQ ID NO: 2366 - RNA, 19 nt, Artificial Sequence
  Synthetic
gagaaagugguuuaaagua

SEQ ID NO: 2367 - RNA, 19 nt, Artificial Sequence
  Synthetic
gguuuaaaguaccuucaaa

SEQ ID NO: 2368 - RNA, 19 nt, Artificial Sequence
  Synthetic
caagaaaugcaaacaugaa

SEQ ID NO: 2369 - RNA, 19 nt, Artificial Sequence
  Synthetic
cauuaucaaacaagaggaa

SEQ ID NO: 2370 - RNA, 19 nt, Artificial Sequence
  Synthetic
aaagaucacuacagaccaa

SEQ ID NO: 2371 - RNA, 19 nt, Artificial Sequence
  Synthetic
ggauagcaaagaagaaaua

SEQ ID NO: 2372 - RNA, 19 nt, Artificial Sequence
  Synthetic
caagaauccuuuuggcuua

SEQ ID NO: 2373 - RNA, 19 nt, Artificial Sequence
  Synthetic
ugguaacgcuuuaugaaua

SEQ ID NO: 2374 - RNA, 19 nt, Artificial Sequence
  Synthetic
ccgggaaauuuaugauauu

SEQ ID NO: 2375 - RNA, 19 nt, Artificial Sequence
  Synthetic
aaacuauccugcagaauau

SEQ ID NO: 2376 - RNA, 19 nt, Artificial Sequence
  Synthetic
cuaaagaugcagaaauuga

SEQ ID NO: 2377 - RNA, 19 nt, Artificial Sequence
  Synthetic
cuacuaaagaugcagaaau

SEQ ID NO: 2378 - RNA, 19 nt, Artificial Sequence
  Synthetic
guacugaccaucaaugaaa

SEQ ID NO: 2379 - RNA, 19 nt, Artificial Sequence
  Synthetic
gugaaugaauacuggaauc

SEQ ID NO: 2380 - RNA, 19 nt, Artificial Sequence
  Synthetic
gaccuuagcugaugaggau

SEQ ID NO: 2381 - RNA, 19 nt, Artificial Sequence
  Synthetic
aggaugaccgggaaauuua

SEQ ID NO: 2382 - RNA, 19 nt, Artificial Sequence
  Synthetic
gauaaagacaaaccgaaga

SEQ ID NO: 2383 - RNA, 19 nt, Artificial Sequence
  Synthetic
uaaacuauccugcagaaua

SEQ ID NO: 2384 - RNA, 19 nt, Artificial Sequence
  Synthetic
caucuguguugauacaaua

SEQ ID NO: 2385 - RNA, 19 nt, Artificial Sequence
  Synthetic
uaugguacuuggaugauaa

SEQ ID NO: 2386 - RNA, 19 nt, Artificial Sequence
  Synthetic
caucauaacauggaaucua

SEQ ID NO: 2387 - RNA, 19 nt, Artificial Sequence
  Synthetic
augcagaaauugaugaucu

SEQ ID NO: 2388 - RNA, 19 nt, Artificial Sequence
  Synthetic
agagcaagauaaagacaaa

SEQ ID NO: 2389 - RNA, 19 nt, Artificial Sequence
  Synthetic
gacagaaguuuguuggaaa

SEQ ID NO: 2390 - RNA, 19 nt, Artificial Sequence
  Synthetic
acagaaguuuguuggaaaa

SEQ ID NO: 2391 - RNA, 19 nt, Artificial Sequence
  Synthetic
caucggaagagaacagcaa

SEQ ID NO: 2392 - RNA, 19 nt, Artificial Sequence
  Synthetic
gaagaaauauauugccagu

SEQ ID NO: 2393 - RNA, 19 nt, Artificial Sequence
  Synthetic
caguucagcacaagaguuu

SEQ ID NO: 2394 - RNA, 19 nt, Artificial Sequence
  Synthetic
gaugaggaugaccgggaaa

SEQ ID NO: 2395 - RNA, 19 nt, Artificial Sequence
  Synthetic
aaaggauagcaaagaagaa

SEQ ID NO: 2396 - RNA, 19 nt, Artificial Sequence
  Synthetic
gaagagaacagcaaggacu

SEQ ID NO: 2397 - RNA, 19 nt, Artificial Sequence
  Synthetic
gugaauaucucuaucagga

SEQ ID NO: 2398 - RNA, 19 nt, Artificial Sequence
  Synthetic
aauugaagacuuugguaca

SEQ ID NO: 2399 - RNA, 19 nt, Artificial Sequence
  Synthetic
agacagaaguuuguuggaa

SEQ ID NO: 2400 - RNA, 19 nt, Artificial Sequence
  Synthetic
ugaaagugaaguugagcca

SEQ ID NO: 2401 - RNA, 19 nt, Artificial Sequence
  Synthetic
gaaagaagaagaagagaaa

SEQ ID NO: 2402 - RNA, 19 nt, Artificial Sequence
  Synthetic
agaaagaguucaaggcaua

SEQ ID NO: 2403 - RNA, 19 nt, Artificial Sequence
  Synthetic
ggaccugaaugaugagaaa

SEQ ID NO: 2404 - RNA, 19 nt, Artificial Sequence
  Synthetic
agaaagagaagaagagcaa

SEQ ID NO: 2405 - RNA, 19 nt, Artificial Sequence
  Synthetic
gcaagaagaagaagaagaa

SEQ ID NO: 2406 - RNA, 19 nt, Artificial Sequence
  Synthetic
gcaagaagguucaggaguu

SEQ ID NO: 2407 - RNA, 19 nt, Artificial Sequence
  Synthetic
ccaaggaggaccagauaaa

SEQ ID NO: 2408 - RNA, 19 nt, Artificial Sequence
  Synthetic
gaagaggauuugucagaaa

SEQ ID NO: 2409 - RNA, 19 nt, Artificial Sequence
  Synthetic
agaaagaagaagaagagaa

SEQ ID NO: 2410 - RNA, 19 nt, Artificial Sequence
  Synthetic
uagagaagguggaggaaaa

SEQ ID NO: 2411 - RNA, 19 nt, Artificial Sequence
  Synthetic
caacaaagagggagaagau

SEQ ID NO: 2412 - RNA, 19 nt, Artificial Sequence
  Synthetic
cagcaaauuucuugaugaa

SEQ ID NO: 2413 - RNA, 19 nt, Artificial Sequence
  Synthetic
cuccaaagcucaagaagaa

SEQ ID NO: 2414 - RNA, 19 nt, Artificial Sequence
  Synthetic
uggaagaacugcugaguga

SEQ ID NO: 2415 - RNA, 19 nt, Artificial Sequence
  Synthetic
acaaagaagagaagaaaga

SEQ ID NO: 2416 - RNA, 19 nt, Artificial Sequence
  Synthetic
ggacuuugguggugaugaa

SEQ ID NO: 2417 - RNA, 19 nt, Artificial Sequence
  Synthetic
ucaaagaagaagagagcau

SEQ ID NO: 2418 - RNA, 19 nt, Artificial Sequence
  Synthetic
ugagaugggccuugggaaa

SEQ ID NO: 2419 - RNA, 19 nt, Artificial Sequence
  Synthetic
gaaagaggcaucugugaaa

SEQ ID NO: 2420 - RNA, 19 nt, Artificial Sequence
  Synthetic
ggagaagauagcaguguua

SEQ ID NO: 2421 - RNA, 19 nt, Artificial Sequence
  Synthetic
gagaaagaguucaaggcau

SEQ ID NO: 2422 - RNA, 19 nt, Artificial Sequence
  Synthetic
aagacaaagaagagaagaa

SEQ ID NO: 2423 - RNA, 19 nt, Artificial Sequence
  Synthetic
acacagaauugcagggcau

SEQ ID NO: 2424 - RNA, 19 nt, Artificial Sequence
  Synthetic
uggcugagguggaggaaaa

SEQ ID NO: 2425 - RNA, 19 nt, Artificial Sequence
  Synthetic
gcagugaggaggaggauau

SEQ ID NO: 2426 - RNA, 19 nt, Artificial Sequence
  Synthetic
agacagaccaccaggacua

SEQ ID NO: 2427 - RNA, 19 nt, Artificial Sequence
  Synthetic
ccuaagagcaagcgccaaa

SEQ ID NO: 2428 - RNA, 19 nt, Artificial Sequence
  Synthetic
gcaauuucuuagagaucaa

SEQ ID NO: 2429 - RNA, 19 nt, Artificial Sequence
  Synthetic
gggaggaagaggagguaga

SEQ ID NO: 2430 - RNA, 19 nt, Artificial Sequence
  Synthetic
aaagagaagaagagcaaau

SEQ ID NO: 2431 - RNA, 19 nt, Artificial Sequence
  Synthetic
agaaagaagugcagaucaa

SEQ ID NO: 2432 - RNA, 19 nt, Artificial Sequence
  Synthetic
agaagaaacucaaggacaa

SEQ ID NO: 2433 - RNA, 19 nt, Artificial Sequence
  Synthetic
ccaagaagcucaaggaaaa

SEQ ID NO: 2434 - RNA, 19 nt, Artificial Sequence
  Synthetic
ggaagaagguucaggaguu

SEQ ID NO: 2435 - RNA, 19 nt, Artificial Sequence
  Synthetic
agacagaccaccaggauua

SEQ ID NO: 2436 - RNA, 19 nt, Artificial Sequence
  Synthetic
ggaagaaggaggacaagaa

SEQ ID NO: 2437 - RNA, 19 nt, Artificial Sequence
  Synthetic
gcaacuaccuggagaugaa

SEQ ID NO: 2438 - RNA, 19 nt, Artificial Sequence
  Synthetic
ccgaggagauggagaauga

SEQ ID NO: 2439 - RNA, 19 nt, Artificial Sequence
  Synthetic
acaccaaggcugaggagaa

SEQ ID NO: 2440 - RNA, 19 nt, Artificial Sequence
  Synthetic
acaagaaggugaugaucua

SEQ ID NO: 2441 - RNA, 19 nt, Artificial Sequence
  Synthetic
gcgagaagaggaagaacaa

SEQ ID NO: 2442 - RNA, 19 nt, Artificial Sequence
  Synthetic
gugaagaagaugagaggga

SEQ ID NO: 2443 - RNA, 19 nt, Artificial Sequence
  Synthetic
cccaagaagcucaaggaaa

SEQ ID NO: 2444 - RNA, 19 nt, Artificial Sequence
  Synthetic
uggauagaguggagaguga

SEQ ID NO: 2445 - RNA, 19 nt, Artificial Sequence
  Synthetic
gcuacaagauugauuacaa

SEQ ID NO: 2446 - RNA, 19 nt, Artificial Sequence
  Synthetic
gcucugaggaugaggauga

SEQ ID NO: 2447 - RNA, 19 nt, Artificial Sequence
  Synthetic
aagagaagucggagaguga

SEQ ID NO: 2448 - RNA, 19 nt, Artificial Sequence
  Synthetic
gcuacauggaugagaaaga

SEQ ID NO: 2449 - RNA, 19 nt, Artificial Sequence
  Synthetic
ucaucaagcaggaggagaa

SEQ ID NO: 2450 - RNA, 19 nt, Artificial Sequence
  Synthetic
ccaaggaagaccagaucaa

SEQ ID NO: 2451 - RNA, 19 nt, Artificial Sequence
  Synthetic
gaaagaacgacauggauga

SEQ ID NO: 2452 - RNA, 19 nt, Artificial Sequence
  Synthetic
gaguggagagugaggacaa

SEQ ID NO: 2453 - RNA, 19 nt, Artificial Sequence
  Synthetic
ucaacaaccuggagggcuu

SEQ ID NO: 2454 - RNA, 19 nt, Artificial Sequence
  Synthetic
gagaaggagcccauugaaa

SEQ ID NO: 2455 - RNA, 19 nt, Artificial Sequence
  Synthetic
gcaaagaagaagcacggua

SEQ ID NO: 2456 - RNA, 19 nt, Artificial Sequence
  Synthetic
gcaagagcgagaagaggaa

SEQ ID NO: 2457 - RNA, 19 nt, Artificial Sequence
  Synthetic
gggaagagcgagaaggagu

SEQ ID NO: 2458 - RNA, 19 nt, Artificial Sequence
  Synthetic
gcaucaagccagaguggau

SEQ ID NO: 2459 - RNA, 19 nt, Artificial Sequence
  Synthetic
uggcauugcuccuggguga

SEQ ID NO: 2460 - RNA, 19 nt, Artificial Sequence
  Synthetic
ggacgagaugucagaagaa

SEQ ID NO: 2461 - RNA, 19 nt, Artificial Sequence
  Synthetic
cgacagcaguccaggauua

SEQ ID NO: 2462 - RNA, 19 nt, Artificial Sequence
  Synthetic
cagacauccugaagaauua

SEQ ID NO: 2463 - RNA, 19 nt, Artificial Sequence
  Synthetic
aagaagaugugcaaaguau

SEQ ID NO: 2464 - RNA, 19 nt, Artificial Sequence
  Synthetic
guagaauuguaguggauga

SEQ ID NO: 2465 - RNA, 19 nt, Artificial Sequence
  Synthetic
cggaacacaacguggcaua

SEQ ID NO: 2466 - RNA, 19 nt, Artificial Sequence
  Synthetic
agacgaagccuuucuguaa

SEQ ID NO: 2467 - RNA, 19 nt, Artificial Sequence
  Synthetic
cuguagaauuguaguggau

SEQ ID NO: 2468 - RNA, 19 nt, Artificial Sequence
  Synthetic
agaaugaaccggaacacaa

SEQ ID NO: 2469 - RNA, 19 nt, Artificial Sequence
  Synthetic
gucacaaacuguagcacaa

SEQ ID NO: 2470 - RNA, 19 nt, Artificial Sequence
  Synthetic
agacaagagucgcagugaa

SEQ ID NO: 2471 - RNA, 19 nt, Artificial Sequence
  Synthetic
gaauuguaguggaugaaaa

SEQ ID NO: 2472 - RNA, 19 nt, Artificial Sequence
  Synthetic
gggagaagggcaaguuuau

SEQ ID NO: 2473 - RNA, 19 nt, Artificial Sequence
  Synthetic
auuuggagcccgagaagaa

SEQ ID NO: 2474 - RNA, 19 nt, Artificial Sequence
  Synthetic
ggaagaaugaaccggaaca

SEQ ID NO: 2475 - RNA, 19 nt, Artificial Sequence
  Synthetic
caagagucgcagugaagaa

SEQ ID NO: 2476 - RNA, 19 nt, Artificial Sequence
  Synthetic
cagcagagacgaagccuuu

SEQ ID NO: 2477 - RNA, 19 nt, Artificial Sequence
  Synthetic
cugaagaauuaccuggcaa

SEQ ID NO: 2478 - RNA, 19 nt, Artificial Sequence
  Synthetic
cagugaagaagaugugcaa

SEQ ID NO: 2479 - RNA, 19 nt, Artificial Sequence
  Synthetic
ccaguggaacagugauuaa

SEQ ID NO: 2480 - RNA, 19 nt, Artificial Sequence
  Synthetic
gaagaaaaugagaggagau

SEQ ID NO: 2481 - RNA, 19 nt, Artificial Sequence
  Synthetic
aguauggaugccaggaaua

SEQ ID NO: 2482 - RNA, 19 nt, Artificial Sequence
  Synthetic
gugaagaagaugugcaaag

SEQ ID NO: 2483 - RNA, 19 nt, Artificial Sequence
  Synthetic
agaagggagcauaaguuua

SEQ ID NO: 2484 - RNA, 19 nt, Artificial Sequence
  Synthetic
caggaagaaugaaccggaa

SEQ ID NO: 2485 - RNA, 19 nt, Artificial Sequence
  Synthetic
ggagaucacuguagaauug

SEQ ID NO: 2486 - RNA, 19 nt, Artificial Sequence
  Synthetic
cagacaagauggaggagac

SEQ ID NO: 2487 - RNA, 19 nt, Artificial Sequence
  Synthetic
acacaagaauccuuugaga

SEQ ID NO: 2488 - RNA, 19 nt, Artificial Sequence
  Synthetic
gagaagggagcauaaguuu

SEQ ID NO: 2489 - RNA, 19 nt, Artificial Sequence
  Synthetic
agcugaagguuguuaagaa

SEQ ID NO: 2490 - RNA, 19 nt, Artificial Sequence
  Synthetic
cucccaaaguauugugauu

SEQ ID NO: 2491 - RNA, 19 nt, Artificial Sequence
  Synthetic
gcacaugagaggagagaaa

SEQ ID NO: 2492 - RNA, 19 nt, Artificial Sequence
  Synthetic
agacagagagugagccaaa

SEQ ID NO: 2493 - RNA, 19 nt, Artificial Sequence
  Synthetic
gagaaauacacgucugaua

SEQ ID NO: 2494 - RNA, 19 nt, Artificial Sequence
  Synthetic
cacacaacuuggagguaaa

SEQ ID NO: 2495 - RNA, 19 nt, Artificial Sequence
  Synthetic
aggaugacaugcagaggaa

SEQ ID NO: 2496 - RNA, 19 nt, Artificial Sequence
  Synthetic
agaaauacacgucugauaa

SEQ ID NO: 2497 - RNA, 19 nt, Artificial Sequence
  Synthetic
ggacaacuacaauagguaa

SEQ ID NO: 2498 - RNA, 19 nt, Artificial Sequence
  Synthetic
cagcagagccugugucuca

SEQ ID NO: 2499 - RNA, 19 nt, Artificial Sequence
  Synthetic
gcugauacccgaagcgaca

SEQ ID NO: 2500 - RNA, 19 nt, Artificial Sequence
  Synthetic
ucacacaacuuggagguaa

SEQ ID NO: 2501 - RNA, 19 nt, Artificial Sequence
  Synthetic
cugauaagacuucaugaaa

SEQ ID NO: 2502 - RNA, 19 nt, Artificial Sequence
  Synthetic
cgacaacaccugcagaaga

SEQ ID NO: 2503 - RNA, 19 nt, Artificial Sequence
  Synthetic
ccaccaugaugaugacaca

SEQ ID NO: 2504 - RNA, 19 nt, Artificial Sequence
  Synthetic
gcagaggaacugagaucga

SEQ ID NO: 2505 - RNA, 19 nt, Artificial Sequence
  Synthetic
cagcccagacagagaguga

SEQ ID NO: 2506 - RNA, 19 nt, Artificial Sequence
  Synthetic
gcauagagcuggucucacu

SEQ ID NO: 2507 - RNA, 19 nt, Artificial Sequence
  Synthetic
ccaggaagagccagcaaga

SEQ ID NO: 2508 - RNA, 19 nt, Artificial Sequence
  Synthetic
gacaacaccugcagaagau

SEQ ID NO: 2509 - RNA, 19 nt, Artificial Sequence
  Synthetic
cugcacaauuauacacuau

SEQ ID NO: 2510 - RNA, 19 nt, Artificial Sequence
  Synthetic
gcacacacauguaccuaga

SEQ ID NO: 2511 - RNA, 19 nt, Artificial Sequence
  Synthetic
ggaggauggacaacuacaa

SEQ ID NO: 2512 - RNA, 19 nt, Artificial Sequence
  Synthetic
gaagagccagcaagagcaa

SEQ ID NO: 2513 - RNA, 19 nt, Artificial Sequence
  Synthetic
aggaggaucugcugugcau

SEQ ID NO: 2514 - RNA, 19 nt, Artificial Sequence
  Synthetic
ucugauaagacuucaugaa

SEQ ID NO: 2515 - RNA, 19 nt, Artificial Sequence
  Synthetic
aggauggacaacuacaaua

SEQ ID NO: 2516 - RNA, 19 nt, Artificial Sequence
  Synthetic
ccagacagagagugagcca

SEQ ID NO: 2517 - RNA, 19 nt, Artificial Sequence
  Synthetic
gagagaaauacacgucuga

SEQ ID NO: 2518 - RNA, 19 nt, Artificial Sequence
  Synthetic
ucgggaaucuggcugguau

SEQ ID NO: 2519 - RNA, 19 nt, Artificial Sequence
  Synthetic
ccacugcuguacaccuaaa

SEQ ID NO: 2520 - RNA, 19 nt, Artificial Sequence
  Synthetic
ccgcauguggcuucauuau

SEQ ID NO: 2521 - RNA, 19 nt, Artificial Sequence
  Synthetic
ggguaaacaccaagaauau

SEQ ID NO: 2522 - RNA, 19 nt, Artificial Sequence
  Synthetic
gcacagagccaguuggaau

SEQ ID NO: 2523 - RNA, 19 nt, Artificial Sequence
  Synthetic
aggaaaugcaggcggguaa

SEQ ID NO: 2524 - RNA, 19 nt, Artificial Sequence
  Synthetic
cgucuuuguuguagguuua

SEQ ID NO: 2525 - RNA, 19 nt, Artificial Sequence
  Synthetic
ggaaguugauggaaagaca

SEQ ID NO: 2526 - RNA, 19 nt, Artificial Sequence
  Synthetic
uaggaaagcucaaguaaau

SEQ ID NO: 2527 - RNA, 19 nt, Artificial Sequence
  Synthetic
uauuggaaguugauggaaa

SEQ ID NO: 2528 - RNA, 19 nt, Artificial Sequence
  Synthetic
cggguaaacaccaagaaua

SEQ ID NO: 2529 - RNA, 19 nt, Artificial Sequence
  Synthetic
cauaaggaggugagaagua

SEQ ID NO: 2530 - RNA, 19 nt, Artificial Sequence
  Synthetic
aggaagagcugcaaaggau

SEQ ID NO: 2531 - RNA, 19 nt, Artificial Sequence
  Synthetic
gguaguagauggcagaaca

SEQ ID NO: 2532 - RNA, 19 nt, Artificial Sequence
  Synthetic
gcaaagaggagcaaccauu

SEQ ID NO: 2533 - RNA, 19 nt, Artificial Sequence
  Synthetic
guuauaaccugacgcuaaa

SEQ ID NO: 2534 - RNA, 19 nt, Artificial Sequence
  Synthetic
cgauuaaucuauaggaaag

SEQ ID NO: 2535 - RNA, 19 nt, Artificial Sequence
  Synthetic
ccuuggagauagaugauau

SEQ ID NO: 2536 - RNA, 19 nt, Artificial Sequence
  Synthetic
ggaagagcugcaaaggaua

SEQ ID NO: 2537 - RNA, 19 nt, Artificial Sequence
  Synthetic
cagaagacccagcaguuua

SEQ ID NO: 2538 - RNA, 19 nt, Artificial Sequence
  Synthetic
gcauggagcccuuggagau

SEQ ID NO: 2539 - RNA, 19 nt, Artificial Sequence
  Synthetic
ugacaaaccuucagauucu

SEQ ID NO: 2540 - RNA, 19 nt, Artificial Sequence
  Synthetic
gcuaaagaguucauaagga

SEQ ID NO: 2541 - RNA, 19 nt, Artificial Sequence
  Synthetic
ccacagacauccagugacu

SEQ ID NO: 2542 - RNA, 19 nt, Artificial Sequence
  Synthetic
gcaaaagaauguauuggaa

SEQ ID NO: 2543 - RNA, 19 nt, Artificial Sequence
  Synthetic
ugcaaaggauaaagaauga

SEQ ID NO: 2544 - RNA, 19 nt, Artificial Sequence
  Synthetic
gaagagcugcaaaggauaa

SEQ ID NO: 2545 - RNA, 19 nt, Artificial Sequence
  Synthetic
uagcagacccagagguuuu

SEQ ID NO: 2546 - RNA, 19 nt, Artificial Sequence
  Synthetic
gggcaguaacagagucaca

SEQ ID NO: 2547 - RNA, 19 nt, Artificial Sequence
  Synthetic
aagaauaugcaguguccaa

SEQ ID NO: 2548 - RNA, 19 nt, Artificial Sequence
  Synthetic
cuaaacaaccagagggaug

SEQ ID NO: 2549 - RNA, 19 nt, Artificial Sequence
  Synthetic
uagcagaccugauugagaa

SEQ ID NO: 2550 - RNA, 19 nt, Artificial Sequence
  Synthetic
gcugcaaaggauaaagaau

SEQ ID NO: 2551 - RNA, 19 nt, Artificial Sequence
  Synthetic
ggaagaaaugaguggcuua

SEQ ID NO: 2552 - RNA, 19 nt, Artificial Sequence
  Synthetic
uggcaagcauugaggcaaa

SEQ ID NO: 2553 - RNA, 19 nt, Artificial Sequence
  Synthetic
gcuaaugugugcuguguua

SEQ ID NO: 2554 - RNA, 19 nt, Artificial Sequence
  Synthetic
cauaagaaccuguuagcua

SEQ ID NO: 2555 - RNA, 19 nt, Artificial Sequence
  Synthetic
gcauugaggcaaaggcuaa

SEQ ID NO: 2556 - RNA, 19 nt, Artificial Sequence
  Synthetic
aagaaauaagagagagcaa

SEQ ID NO: 2557 - RNA, 19 nt, Artificial Sequence
  Synthetic
cgacaaagaccgaaaagaa

SEQ ID NO: 2558 - RNA, 19 nt, Artificial Sequence
  Synthetic
ggacagaggucaaaggucu

SEQ ID NO: 2559 - RNA, 19 nt, Artificial Sequence
  Synthetic
ggaagaggauauuaagaga

SEQ ID NO: 2560 - RNA, 19 nt, Artificial Sequence
  Synthetic
ggucaaaggucuaucagga

SEQ ID NO: 2561 - RNA, 19 nt, Artificial Sequence
  Synthetic
uuauauagcuuguggaagu

SEQ ID NO: 2562 - RNA, 19 nt, Artificial Sequence
  Synthetic
ggauauuaagagaguggaa

SEQ ID NO: 2563 - RNA, 19 nt, Artificial Sequence
  Synthetic
caagaagaaauaagagaga

SEQ ID NO: 2564 - RNA, 19 nt, Artificial Sequence
  Synthetic
ccucaagguugcaagaaga

SEQ ID NO: 2565 - RNA, 19 nt, Artificial Sequence
  Synthetic
aagaaacagccuugguaua

SEQ ID NO: 2566 - RNA, 19 nt, Artificial Sequence
  Synthetic
ggaguuacaaagaagauua

SEQ ID NO: 2567 - RNA, 19 nt, Artificial Sequence
  Synthetic
guuugugaguggugaggaa

SEQ ID NO: 2568 - RNA, 19 nt, Artificial Sequence
  Synthetic
agaaacaacuggaagcaga

SEQ ID NO: 2569 - RNA, 19 nt, Artificial Sequence
  Synthetic
caacagacagucagcuaaa

SEQ ID NO: 2570 - RNA, 19 nt, Artificial Sequence
  Synthetic
acuguggaauguagggaaa

SEQ ID NO: 2571 - RNA, 19 nt, Artificial Sequence
  Synthetic
cagaaggagcuaaguguuu

SEQ ID NO: 2572 - RNA, 19 nt, Artificial Sequence
  Synthetic
caaaaguguucucgacaaa

SEQ ID NO: 2573 - RNA, 19 nt, Artificial Sequence
  Synthetic
uuaagagaguggaagaaau

SEQ ID NO: 2574 - RNA, 19 nt, Artificial Sequence
  Synthetic
gaagaagcauacaugacaa

SEQ ID NO: 2575 - RNA, 19 nt, Artificial Sequence
  Synthetic
gagcaugagaagagguguu

SEQ ID NO: 2576 - RNA, 19 nt, Artificial Sequence
  Synthetic
agagagagcaacuggaaca

SEQ ID NO: 2577 - RNA, 19 nt, Artificial Sequence
  Synthetic
aguuacuagugcagaagaa

SEQ ID NO: 2578 - RNA, 19 nt, Artificial Sequence
  Synthetic
gaaauaagagagagcaacu

SEQ ID NO: 2579 - RNA, 19 nt, Artificial Sequence
  Synthetic
ccagauaccauuuggcuuu

SEQ ID NO: 2580 - RNA, 19 nt, Artificial Sequence
  Synthetic
gagaagagguguuggagug

SEQ ID NO: 2581 - RNA, 19 nt, Artificial Sequence
  Synthetic
gcaacaaggucauuagaua

SEQ ID NO: 2582 - RNA, 19 nt, Artificial Sequence
  Synthetic
ucguaaaucccaagaguua

SEQ ID NO: 2583 - RNA, 19 nt, Artificial Sequence
  Synthetic
uaaaaggaguucaggaaaa

SEQ ID NO: 2584 - RNA, 19 nt, Artificial Sequence
  Synthetic
ggagaacucugaagaacua

SEQ ID NO: 2585 - RNA, 19 nt, Artificial Sequence
  Synthetic
cccaagaguuacagaguca

SEQ ID NO: 2586 - RNA, 19 nt, Artificial Sequence
  Synthetic
guaauaaugcccuggagaa

SEQ ID NO: 2587 - RNA, 19 nt, Artificial Sequence
  Synthetic
ucucagaguuagaugaaga

SEQ ID NO: 2588 - RNA, 19 nt, Artificial Sequence
  Synthetic
aaaggaaccugaagaauuu

SEQ ID NO: 2589 - RNA, 19 nt, Artificial Sequence
  Synthetic
caacaaggucauuagauau

SEQ ID NO: 2590 - RNA, 19 nt, Artificial Sequence
  Synthetic
uaaaggaaccugaagaauu

SEQ ID NO: 2591 - RNA, 19 nt, Artificial Sequence
  Synthetic
uauaaaggaaccugaagaa

SEQ ID NO: 2592 - RNA, 19 nt, Artificial Sequence
  Synthetic
cagaguuagaugaagaauu

SEQ ID NO: 2593 - RNA, 19 nt, Artificial Sequence
  Synthetic
ccauggacucccagaaaga

SEQ ID NO: 2594 - RNA, 19 nt, Artificial Sequence
  Synthetic
cuacagaggaucauuucaa

SEQ ID NO: 2595 - RNA, 19 nt, Artificial Sequence
  Synthetic
acuaaaaggaguucaggaa

SEQ ID NO: 2596 - RNA, 19 nt, Artificial Sequence
  Synthetic
gcaggaacaagcucguaaa

SEQ ID NO: 2597 - RNA, 19 nt, Artificial Sequence
  Synthetic
ggaacaagcucguaaaucc

SEQ ID NO: 2598 - RNA, 19 nt, Artificial Sequence
  Synthetic
ggaugaaguaaaagaaagu

SEQ ID NO: 2599 - RNA, 19 nt, Artificial Sequence
  Synthetic
ggucauuagauauaaagga

SEQ ID NO: 2600 - RNA, 19 nt, Artificial Sequence
  Synthetic
agauauaaaggaaccugaa

SEQ ID NO: 2601 - RNA, 19 nt, Artificial Sequence
  Synthetic
auauaaaggaaccugaaga

SEQ ID NO: 2602 - RNA, 19 nt, Artificial Sequence
  Synthetic
caggaaaauucguccaaca

SEQ ID NO: 2603 - RNA, 19 nt, Artificial Sequence
  Synthetic
ccuggagaacucugaagaa

SEQ ID NO: 2604 - RNA, 19 nt, Artificial Sequence
  Synthetic
cgccauggacucccagaaa

SEQ ID NO: 2605 - RNA, 19 nt, Artificial Sequence
  Synthetic
cuaaaaggaguucaggaaa

SEQ ID NO: 2606 - RNA, 19 nt, Artificial Sequence
  Synthetic
uuucaacucuggcaaauaa

SEQ ID NO: 2607 - RNA, 19 nt, Artificial Sequence
  Synthetic
agaauuugcaacaagguca

SEQ ID NO: 2608 - RNA, 19 nt, Artificial Sequence
  Synthetic
acucuauacuggaugaagu

SEQ ID NO: 2609 - RNA, 19 nt, Artificial Sequence
  Synthetic
gcucguaaaucccaagagu

SEQ ID NO: 2610 - RNA, 19 nt, Artificial Sequence
  Synthetic
gaguuacagagucagauua

SEQ ID NO: 2611 - RNA, 19 nt, Artificial Sequence
  Synthetic
gcaaagugcugaauggaau

SEQ ID NO: 2612 - RNA, 19 nt, Artificial Sequence
  Synthetic
ggaugagaguguacugaaa

SEQ ID NO: 2613 - RNA, 19 nt, Artificial Sequence
  Synthetic
gagaagauuugauggauga

SEQ ID NO: 2614 - RNA, 19 nt, Artificial Sequence
  Synthetic
gcaaagggcccuacguuaa

SEQ ID NO: 2615 - RNA, 19 nt, Artificial Sequence
  Synthetic
ccagauauauggagcucua

SEQ ID NO: 2616 - RNA, 19 nt, Artificial Sequence
  Synthetic
gguuauaucaguugucuaa

SEQ ID NO: 2617 - RNA, 19 nt, Artificial Sequence
  Synthetic
gaacaaguccucauugaaa

SEQ ID NO: 2618 - RNA, 19 nt, Artificial Sequence
  Synthetic
gcaaauaguucauguugga

SEQ ID NO: 2619 - RNA, 19 nt, Artificial Sequence
  Synthetic
ccucuaaacuucagcgcau

SEQ ID NO: 2620 - RNA, 19 nt, Artificial Sequence
  Synthetic
aaggagaauugguaacuaa

SEQ ID NO: 2621 - RNA, 19 nt, Artificial Sequence
  Synthetic
ucaaguacauagaagacaa

SEQ ID NO: 2622 - RNA, 19 nt, Artificial Sequence
  Synthetic
ugaggaagguucugaaaca

SEQ ID NO: 2623 - RNA, 19 nt, Artificial Sequence
  Synthetic
acaagaaaccacacacaaa

SEQ ID NO: 2624 - RNA, 19 nt, Artificial Sequence
  Synthetic
cgacagcacucaaauuaaa

SEQ ID NO: 2625 - RNA, 19 nt, Artificial Sequence
  Synthetic
cguuaacaguguauaaaga

SEQ ID NO: 2626 - RNA, 19 nt, Artificial Sequence
  Synthetic
cauagaagacaaagacgua

SEQ ID NO: 2627 - RNA, 19 nt, Artificial Sequence
  Synthetic
cgaaggacgaaaaggaaua

SEQ ID NO: 2628 - RNA, 19 nt, Artificial Sequence
  Synthetic
acaaagacguauuucagaa

SEQ ID NO: 2629 - RNA, 19 nt, Artificial Sequence
  Synthetic
agaugaauuagcaaggaaa

SEQ ID NO: 2630 - RNA, 19 nt, Artificial Sequence
  Synthetic
ccaggauggccuaggagaa

SEQ ID NO: 2631 - RNA, 19 nt, Artificial Sequence
  Synthetic
gcaaagaucugaacgagca

SEQ ID NO: 2632 - RNA, 19 nt, Artificial Sequence
  Synthetic
aagaauauuuggagcgagu

SEQ ID NO: 2633 - RNA, 19 nt, Artificial Sequence
  Synthetic
cuacguuaacaguguauaa

SEQ ID NO: 2634 - RNA, 19 nt, Artificial Sequence
  Synthetic
ggugaaaccaucaauacaa

SEQ ID NO: 2635 - RNA, 19 nt, Artificial Sequence
  Synthetic
caacaaugacgcuggcuuu

SEQ ID NO: 2636 - RNA, 19 nt, Artificial Sequence
  Synthetic
ccgaacagaagcaggaaca

SEQ ID NO: 2637 - RNA, 19 nt, Artificial Sequence
  Synthetic
uggcugacacagagagauu

SEQ ID NO: 2638 - RNA, 19 nt, Artificial Sequence
  Synthetic
agacagugcuugauguuca

SEQ ID NO: 2639 - RNA, 19 nt, Artificial Sequence
  Synthetic
caucaaugugccaaugaaa

SEQ ID NO: 2640 - RNA, 19 nt, Artificial Sequence
  Synthetic
agucgaagcuauuggucuu

SEQ ID NO: 2641 - RNA, 19 nt, Artificial Sequence
  Synthetic
cgaaagagcaacauggaau

SEQ ID NO: 2642 - RNA, 19 nt, Artificial Sequence
  Synthetic
acgcaagaaugcuggcaaa

SEQ ID NO: 2643 - RNA, 19 nt, Artificial Sequence
  Synthetic
cagcaagggugcagacuau

SEQ ID NO: 2644 - RNA, 19 nt, Artificial Sequence
  Synthetic
acguuuaauucauggguua

SEQ ID NO: 2645 - RNA, 19 nt, Artificial Sequence
  Synthetic
caguaauagauuugggaau

SEQ ID NO: 2646 - RNA, 19 nt, Artificial Sequence
  Synthetic
guguacaggugaaguuaaa

SEQ ID NO: 2647 - RNA, 19 nt, Artificial Sequence
  Synthetic
gcgaaagggaugacagaga

SEQ ID NO: 2648 - RNA, 19 nt, Artificial Sequence
  Synthetic
cugaagaagccaugaucaa

SEQ ID NO: 2649 - RNA, 19 nt, Artificial Sequence
  Synthetic
gcgcugaucucaacaauaa

SEQ ID NO: 2650 - RNA, 19 nt, Artificial Sequence
  Synthetic
ggaagauauugaugcagaa

SEQ ID NO: 2651 - RNA, 19 nt, Artificial Sequence
  Synthetic
gaaaaugccuagagauauu

SEQ ID NO: 2652 - RNA, 19 nt, Artificial Sequence
  Synthetic
uuggauauguggaggaaau

SEQ ID NO: 2653 - RNA, 19 nt, Artificial Sequence
  Synthetic
aaaccaagacacaguaaua

SEQ ID NO: 2654 - RNA, 19 nt, Artificial Sequence
  Synthetic
gacccaaaccagaaaguaa

SEQ ID NO: 2655 - RNA, 19 nt, Artificial Sequence
  Synthetic
ggaggaaauugaugguuga

SEQ ID NO: 2656 - RNA, 19 nt, Artificial Sequence
  Synthetic
cagucaagagcuagguuua

SEQ ID NO: 2657 - RNA, 19 nt, Artificial Sequence
  Synthetic
cggcagaugaauacagcua

SEQ ID NO: 2658 - RNA, 19 nt, Artificial Sequence
  Synthetic
aaggaaacuuacaugguua

SEQ ID NO: 2659 - RNA, 19 nt, Artificial Sequence
  Synthetic
cagagaaugaaguggaaga

SEQ ID NO: 2660 - RNA, 19 nt, Artificial Sequence
  Synthetic
guauugaaguucugauaga

SEQ ID NO: 2661 - RNA, 19 nt, Artificial Sequence
  Synthetic
gcagaaagacacaccacaa

SEQ ID NO: 2662 - RNA, 19 nt, Artificial Sequence
  Synthetic
gcagaagauuucaacacua

SEQ ID NO: 2663 - RNA, 19 nt, Artificial Sequence
  Synthetic
gugacaacuuacugaagaa

SEQ ID NO: 2664 - RNA, 19 nt, Artificial Sequence
  Synthetic
gacugaaacaggagaguau

SEQ ID NO: 2665 - RNA, 19 nt, Artificial Sequence
  Synthetic
cuacaucaaugcagaaaga

SEQ ID NO: 2666 - RNA, 19 nt, Artificial Sequence
  Synthetic
cugaaacaggagaguauua

SEQ ID NO: 2667 - RNA, 19 nt, Artificial Sequence
  Synthetic
ccguggucauguuggaaua

SEQ ID NO: 2668 - RNA, 19 nt, Artificial Sequence
  Synthetic
cgaaagggaugacagagaa

SEQ ID NO: 2669 - RNA, 19 nt, Artificial Sequence
  Synthetic
aaaugaucgugguggagaa

SEQ ID NO: 2670 - RNA, 19 nt, Artificial Sequence
  Synthetic
ggaagugcaugguaaauuu

SEQ ID NO: 2671 - RNA, 19 nt, Artificial Sequence
  Synthetic
ggaaagugauuaagcaaua

SEQ ID NO: 2672 - RNA, 19 nt, Artificial Sequence
  Synthetic
gaaggaauguuuagggaua

SEQ ID NO: 2673 - RNA, 19 nt, Artificial Sequence
  Synthetic
gaaagaagaugcagcacaa

SEQ ID NO: 2674 - RNA, 19 nt, Artificial Sequence
  Synthetic
ggugaugauuagagacaua

SEQ ID NO: 2675 - RNA, 19 nt, Artificial Sequence
  Synthetic
cgucaaaacuggaaggaau

SEQ ID NO: 2676 - RNA, 19 nt, Artificial Sequence
  Synthetic
gguaagauguuuauaggaa

SEQ ID NO: 2677 - RNA, 19 nt, Artificial Sequence
  Synthetic
cugaagaaggagaaggaaa

SEQ ID NO: 2678 - RNA, 19 nt, Artificial Sequence
  Synthetic
aagacaugcuuuugagaua

SEQ ID NO: 2679 - RNA, 19 nt, Artificial Sequence
  Synthetic
cgacagaaaacaugagaua

SEQ ID NO: 2680 - RNA, 19 nt, Artificial Sequence
  Synthetic
gggcaaaccacuauagauu

SEQ ID NO: 2681 - RNA, 19 nt, Artificial Sequence
  Synthetic
caucuguacuguagaauua

SEQ ID NO: 2682 - RNA, 19 nt, Artificial Sequence
  Synthetic
cggaagaaccaauuguaaa

SEQ ID NO: 2683 - RNA, 19 nt, Artificial Sequence
  Synthetic
cggcaaacucuauuggaua

SEQ ID NO: 2684 - RNA, 19 nt, Artificial Sequence
  Synthetic
aaggaaagcuguugcauau

SEQ ID NO: 2685 - RNA, 19 nt, Artificial Sequence
  Synthetic
ggacuuauugagagagaau

SEQ ID NO: 2686 - RNA, 19 nt, Artificial Sequence
  Synthetic
aaguagacgacgacagaaa

SEQ ID NO: 2687 - RNA, 19 nt, Artificial Sequence
  Synthetic
gaacccaaaucaaaggaaa

SEQ ID NO: 2688 - RNA, 19 nt, Artificial Sequence
  Synthetic
agaacaagaaguagaaaca

SEQ ID NO: 2689 - RNA, 19 nt, Artificial Sequence
  Synthetic
caugaagacuauaguagaa

SEQ ID NO: 2690 - RNA, 19 nt, Artificial Sequence
  Synthetic
ccgaacaucucauaaauaa

SEQ ID NO: 2691 - RNA, 19 nt, Artificial Sequence
  Synthetic
uugaggagcucuauagaaa

SEQ ID NO: 2692 - RNA, 19 nt, Artificial Sequence
  Synthetic
gcgagaagauguacuaaau

SEQ ID NO: 2693 - RNA, 19 nt, Artificial Sequence
  Synthetic
gcuaacagaacaagaagua

SEQ ID NO: 2694 - RNA, 19 nt, Artificial Sequence
  Synthetic
gguguaacauggaaagcua

SEQ ID NO: 2695 - RNA, 19 nt, Artificial Sequence
  Synthetic
gagaucaaguuguacguua

SEQ ID NO: 2696 - RNA, 19 nt, Artificial Sequence
  Synthetic
gcuaauaguggauuguaua

SEQ ID NO: 2697 - RNA, 19 nt, Artificial Sequence
  Synthetic
ggaaauucagcaagagaca

SEQ ID NO: 2698 - RNA, 19 nt, Artificial Sequence
  Synthetic
gaaagaauccuguugacua

SEQ ID NO: 2699 - RNA, 19 nt, Artificial Sequence
  Synthetic
gaaggaaagcuguugcaua

SEQ ID NO: 2700 - RNA, 19 nt, Artificial Sequence
  Synthetic
ggaaaguaaugguaguuca

SEQ ID NO: 2701 - RNA, 19 nt, Artificial Sequence
  Synthetic
gaaggaaacuguugaggaa

SEQ ID NO: 2702 - RNA, 19 nt, Artificial Sequence
  Synthetic
gcuuagaggaagagggaga

SEQ ID NO: 2703 - RNA, 19 nt, Artificial Sequence
  Synthetic
cguaaucaauccugagaaa

SEQ ID NO: 2704 - RNA, 19 nt, Artificial Sequence
  Synthetic
gcauaaguguuuaaagcaa

SEQ ID NO: 2705 - RNA, 19 nt, Artificial Sequence
  Synthetic
caucaagacuuuuggaaca

SEQ ID NO: 2706 - RNA, 19 nt, Artificial Sequence
  Synthetic
ugucaaagcucaagcauga

SEQ ID NO: 2707 - RNA, 19 nt, Artificial Sequence
  Synthetic
gagacuauauggagagaga

SEQ ID NO: 2708 - RNA, 19 nt, Artificial Sequence
  Synthetic
aaguaaacgcuuagaggaa

SEQ ID NO: 2709 - RNA, 19 nt, Artificial Sequence
  Synthetic
ggagagagacaaagacaau

SEQ ID NO: 2710 - RNA, 19 nt, Artificial Sequence
  Synthetic
gguuaaugcaggaaagaga

SEQ ID NO: 2711 - RNA, 19 nt, Artificial Sequence
  Synthetic
cugcagaacugaucgcaaa

SEQ ID NO: 2712 - RNA, 19 nt, Artificial Sequence
  Synthetic
gcauguggauucaaaguua

SEQ ID NO: 2713 - RNA, 19 nt, Artificial Sequence
  Synthetic
cuauauggagagagacaaa

SEQ ID NO: 2714 - RNA, 19 nt, Artificial Sequence
  Synthetic
gaauuuugaucauggcaua

SEQ ID NO: 2715 - RNA, 19 nt, Artificial Sequence
  Synthetic
gaagagggagacagaguaa

SEQ ID NO: 2716 - RNA, 19 nt, Artificial Sequence
  Synthetic
agaaacagcuauuaggaga

SEQ ID NO: 2717 - RNA, 19 nt, Artificial Sequence
  Synthetic
ggaagagacuaauugcuua

SEQ ID NO: 2718 - RNA, 19 nt, Artificial Sequence
  Synthetic
guugaacagugaaaggaaa

SEQ ID NO: 2719 - RNA, 19 nt, Artificial Sequence
  Synthetic
aaagagagguuccagaaua

SEQ ID NO: 2720 - RNA, 19 nt, Artificial Sequence
  Synthetic
guuaagagcaggcaacaaa

SEQ ID NO: 2721 - RNA, 19 nt, Artificial Sequence
  Synthetic
agagaagacucacuagaua

SEQ ID NO: 2722 - RNA, 19 nt, Artificial Sequence
  Synthetic
gcgaguacaucaagacuuu

SEQ ID NO: 2723 - RNA, 19 nt, Artificial Sequence
  Synthetic
ggagaacauuuaacagcaa

SEQ ID NO: 2724 - RNA, 19 nt, Artificial Sequence
  Synthetic
aggaaguauuuaaggcauu

SEQ ID NO: 2725 - RNA, 19 nt, Artificial Sequence
  Synthetic
gcuauuaggagaacauuua

SEQ ID NO: 2726 - RNA, 19 nt, Artificial Sequence
  Synthetic
ggucauaaucuucuaguuu

SEQ ID NO: 2727 - RNA, 19 nt, Artificial Sequence
  Synthetic
gagagaguguuucaggaua

SEQ ID NO: 2728 - RNA, 19 nt, Artificial Sequence
  Synthetic
gaucauggcauaaguguuu

SEQ ID NO: 2729 - RNA, 19 nt, Artificial Sequence
  Synthetic
gcucagaugaucagcauuu

SEQ ID NO: 2730 - RNA, 19 nt, Artificial Sequence
  Synthetic
guaaacgcuuagaggaaga

SEQ ID NO: 2731 - RNA, 19 nt, Artificial Sequence
  Synthetic
uaacaaacgucuagaagaa

SEQ ID NO: 2732 - RNA, 19 nt, Artificial Sequence
  Synthetic
agaugaagaacuugagaaa

SEQ ID NO: 2733 - RNA, 19 nt, Artificial Sequence
  Synthetic
caaagaagcuacagaugaa

SEQ ID NO: 2734 - RNA, 19 nt, Artificial Sequence
  Synthetic
aauagaggauggagaguua

SEQ ID NO: 2735 - RNA, 19 nt, Artificial Sequence
  Synthetic
cuacauggaaagagauaaa

SEQ ID NO: 2736 - RNA, 19 nt, Artificial Sequence
  Synthetic
gggcaaagacauugaagau

SEQ ID NO: 2737 - RNA, 19 nt, Artificial Sequence
  Synthetic
cagaauuuaaagaggguaa

SEQ ID NO: 2738 - RNA, 19 nt, Artificial Sequence
  Synthetic
gggcauugcuaaaguguuu

SEQ ID NO: 2739 - RNA, 19 nt, Artificial Sequence
  Synthetic
gaaagaaacgguugaagaa

SEQ ID NO: 2740 - RNA, 19 nt, Artificial Sequence
  Synthetic
ccagcaaacuugaaggaau

SEQ ID NO: 2741 - RNA, 19 nt, Artificial Sequence
  Synthetic
ggaaaggaauggugaagca

SEQ ID NO: 2742 - RNA, 19 nt, Artificial Sequence
  Synthetic
caaacauaguggcaggaaa

SEQ ID NO: 2743 - RNA, 19 nt, Artificial Sequence
  Synthetic
ggacaugggacuggaguua

SEQ ID NO: 2744 - RNA, 19 nt, Artificial Sequence
  Synthetic
caagcaagcacuacagaaa

SEQ ID NO: 2745 - RNA, 19 nt, Artificial Sequence
  Synthetic
gggacuacauggaaagaga

SEQ ID NO: 2746 - RNA, 19 nt, Artificial Sequence
  Synthetic
agaaacgguugaagaacaa

SEQ ID NO: 2747 - RNA, 19 nt, Artificial Sequence
  Synthetic
aucagaaagugcagaauaa

SEQ ID NO: 2748 - RNA, 19 nt, Artificial Sequence
  Synthetic
caaaugaagcaguguaauu

SEQ ID NO: 2749 - RNA, 19 nt, Artificial Sequence
  Synthetic
ccaagaagagaaaguuaaa

SEQ ID NO: 2750 - RNA, 19 nt, Artificial Sequence
  Synthetic
gaucagaaagugcagaaua

SEQ ID NO: 2751 - RNA, 19 nt, Artificial Sequence
  Synthetic
gauggagaguuaaggagaa

SEQ ID NO: 2752 - RNA, 19 nt, Artificial Sequence
  Synthetic
caguagaguucgaggugga

SEQ ID NO: 2753 - RNA, 19 nt, Artificial Sequence
  Synthetic
cugcaaacuuguacaaaca

SEQ ID NO: 2754 - RNA, 19 nt, Artificial Sequence
  Synthetic
auugauagaugcuggcaaa

SEQ ID NO: 2755 - RNA, 19 nt, Artificial Sequence
  Synthetic
ucgaauauaucaaggcauu

SEQ ID NO: 2756 - RNA, 19 nt, Artificial Sequence
  Synthetic
cuaaagacaucaugauuca

SEQ ID NO: 2757 - RNA, 19 nt, Artificial Sequence
  Synthetic
gaaggaauguuuaaagaca

SEQ ID NO: 2758 - RNA, 19 nt, Artificial Sequence
  Synthetic
aagauaagguugaccauau

SEQ ID NO: 2759 - RNA, 19 nt, Artificial Sequence
  Synthetic
aaggaauggugaagcaauu

SEQ ID NO: 2760 - RNA, 19 nt, Artificial Sequence
  Synthetic
cagcaaacuugaaggaaug

SEQ ID NO: 2761 - RNA, 19 nt, Artificial Sequence
  Synthetic
ccaaagacccagagagaaa

SEQ ID NO: 2762 - RNA, 19 nt, Artificial Sequence
  Synthetic
gcagaaaguuguaaaguuu

SEQ ID NO: 2763 - RNA, 19 nt, Artificial Sequence
  Synthetic
agaagagaaugaaggaaua

SEQ ID NO: 2764 - RNA, 19 nt, Artificial Sequence
  Synthetic
cugaagagauugaagcaaa

SEQ ID NO: 2765 - RNA, 19 nt, Artificial Sequence
  Synthetic
gaaccaagcuuuuaaggaa

SEQ ID NO: 2766 - RNA, 19 nt, Artificial Sequence
  Synthetic
ugaaagacuuggaggaaca

SEQ ID NO: 2767 - RNA, 19 nt, Artificial Sequence
  Synthetic
cuucaaauuuauagggaca

SEQ ID NO: 2768 - RNA, 19 nt, Artificial Sequence
  Synthetic
gagcaaauagaguggcuaa

SEQ ID NO: 2769 - RNA, 19 nt, Artificial Sequence
  Synthetic
cuacugacucugagaaaua

SEQ ID NO: 2770 - RNA, 19 nt, Artificial Sequence
  Synthetic
agaaauacguugagcaguu

SEQ ID NO: 2771 - RNA, 19 nt, Artificial Sequence
  Synthetic
caaaugguguacagaauua

SEQ ID NO: 2772 - RNA, 19 nt, Artificial Sequence
  Synthetic
cguauaaagcaguuguuaa

SEQ ID NO: 2773 - RNA, 19 nt, Artificial Sequence
  Synthetic
gaaugaaguuggucaauau

SEQ ID NO: 2774 - RNA, 19 nt, Artificial Sequence
  Synthetic
gaugagagaagaagagaau

SEQ ID NO: 2775 - RNA, 19 nt, Artificial Sequence
  Synthetic
ggaaugaacagcagcaaau

SEQ ID NO: 2776 - RNA, 19 nt, Artificial Sequence
  Synthetic
cuacugaacuggaggacuu

SEQ ID NO: 2777 - RNA, 19 nt, Artificial Sequence
  Synthetic
ugauaaaggcccagcaaaa

SEQ ID NO: 2778 - RNA, 19 nt, Artificial Sequence
  Synthetic
aagaagagaaugaaggaau

SEQ ID NO: 2779 - RNA, 19 nt, Artificial Sequence
  Synthetic
gguaaacagggcagcaaua

SEQ ID NO: 2780 - RNA, 19 nt, Artificial Sequence
  Synthetic
caaaguuccuaaugguaua

SEQ ID NO: 2781 - RNA, 19 nt, Artificial Sequence
  Synthetic
gcaguuaagugaaaagaaa

SEQ ID NO: 2782 - RNA, 19 nt, Artificial Sequence
  Synthetic
ugaaauaugcagaugcuaa

SEQ ID NO: 2783 - RNA, 19 nt, Artificial Sequence
  Synthetic
ugagagaagaagagaauga

SEQ ID NO: 2784 - RNA, 19 nt, Artificial Sequence
  Synthetic
agaaaggaugagagaagaa

SEQ ID NO: 2785 - RNA, 19 nt, Artificial Sequence
  Synthetic
cgauagugaaauugaagaa

SEQ ID NO: 2786 - RNA, 19 nt, Artificial Sequence
  Synthetic
aaacaagacgagaauguaa

SEQ ID NO: 2787 - RNA, 19 nt, Artificial Sequence
  Synthetic
cgucuaaucuguuaaagaa

SEQ ID NO: 2788 - RNA, 19 nt, Artificial Sequence
  Synthetic
gaaauaugcagaugcuaaa

SEQ ID NO: 2789 - RNA, 19 nt, Artificial Sequence
  Synthetic
gcacuacguuauuuagaaa

SEQ ID NO: 2790 - RNA, 19 nt, Artificial Sequence
  Synthetic
aaggcaugaucaagagaaa

SEQ ID NO: 2791 - RNA, 19 nt, Artificial Sequence
  Synthetic
uggaaaagcaccugggaaa

SEQ ID NO: 2792 - RNA, 19 nt, Artificial Sequence
  Synthetic
aggaagacauugaggacau

SEQ ID NO: 2793 - RNA, 19 nt, Artificial Sequence
  Synthetic
ccuccuggaucuagagcaa

SEQ ID NO: 2794 - RNA, 19 nt, Artificial Sequence
  Synthetic
uggaagugaaggaggacaa

SEQ ID NO: 2795 - RNA, 19 nt, Artificial Sequence
  Synthetic
aggaggaagaggaggagaa

SEQ ID NO: 2796 - RNA, 19 nt, Artificial Sequence
  Synthetic
gaggacaagugcugggaga

SEQ ID NO: 2797 - RNA, 19 nt, Artificial Sequence
  Synthetic
gcaaggagcacaagagcga

SEQ ID NO: 2798 - RNA, 19 nt, Artificial Sequence
  Synthetic
uguccaaggaugagaucua

SEQ ID NO: 2799 - RNA, 19 nt, Artificial Sequence
  Synthetic
cggagggagaggaggaaga

SEQ ID NO: 2800 - RNA, 19 nt, Artificial Sequence
  Synthetic
gagaggaggaagaggagga

SEQ ID NO: 2801 - RNA, 19 nt, Artificial Sequence
  Synthetic
ccucaaggcccauggagau

SEQ ID NO: 2802 - RNA, 19 nt, Artificial Sequence
  Synthetic
aggacaugguugaggcuga

SEQ ID NO: 2803 - RNA, 19 nt, Artificial Sequence
  Synthetic
gggagaagguggagguguc

SEQ ID NO: 2804 - RNA, 19 nt, Artificial Sequence
  Synthetic
gagcgagaaggaagaggaa

SEQ ID NO: 2805 - RNA, 19 nt, Artificial Sequence
  Synthetic
uggaggauacagagaagaa

SEQ ID NO: 2806 - RNA, 19 nt, Artificial Sequence
  Synthetic
gugaagacggccagaacuu

SEQ ID NO: 2807 - RNA, 19 nt, Artificial Sequence
  Synthetic
uggauguggcggagggaga

SEQ ID NO: 2808 - RNA, 19 nt, Artificial Sequence
  Synthetic
cggcagaagcagaagcaca

SEQ ID NO: 2809 - RNA, 19 nt, Artificial Sequence
  Synthetic
cgccauuacugcugggaga

SEQ ID NO: 2810 - RNA, 19 nt, Artificial Sequence
  Synthetic
uguuugagcaggagcgcaa

SEQ ID NO: 2811 - RNA, 19 nt, Artificial Sequence
  Synthetic
ucgggagugcagagagaaa

SEQ ID NO: 2812 - RNA, 19 nt, Artificial Sequence
  Synthetic
gggagaugguucagaccca

SEQ ID NO: 2813 - RNA, 19 nt, Artificial Sequence
  Synthetic
gggcagugaaagugaagca

SEQ ID NO: 2814 - RNA, 19 nt, Artificial Sequence
  Synthetic
cagagagggcugaugccaa

SEQ ID NO: 2815 - RNA, 19 nt, Artificial Sequence
  Synthetic
acgccaaguaugagagcca

SEQ ID NO: 2816 - RNA, 19 nt, Artificial Sequence
  Synthetic
cgggagaagaagucugaga

SEQ ID NO: 2817 - RNA, 19 nt, Artificial Sequence
  Synthetic
aggagagcaacgaggguga

SEQ ID NO: 2818 - RNA, 19 nt, Artificial Sequence
  Synthetic
caucauggcuguagagaaa

SEQ ID NO: 2819 - RNA, 19 nt, Artificial Sequence
  Synthetic
gcaaauagcauaagagcaa

SEQ ID NO: 2820 - RNA, 19 nt, Artificial Sequence
  Synthetic
cgggaaagggagagagaaa

SEQ ID NO: 2821 - RNA, 19 nt, Artificial Sequence
  Synthetic
ggucaauaguagagaagau

SEQ ID NO: 2822 - RNA, 19 nt, Artificial Sequence
  Synthetic
agagaaagcuagagcaaaa

SEQ ID NO: 2823 - RNA, 19 nt, Artificial Sequence
  Synthetic
cagguaugcuugagaaaua

SEQ ID NO: 2824 - RNA, 19 nt, Artificial Sequence
  Synthetic
cagcaaagguucuuguaua

SEQ ID NO: 2825 - RNA, 19 nt, Artificial Sequence
  Synthetic
gaaauauccucaagugaaa

SEQ ID NO: 2826 - RNA, 19 nt, Artificial Sequence
  Synthetic
gaacaaaucuugaugugaa

SEQ ID NO: 2827 - RNA, 19 nt, Artificial Sequence
  Synthetic
gcacuuauauacuggauua

SEQ ID NO: 2828 - RNA, 19 nt, Artificial Sequence
  Synthetic
ggaagauguuggagcagaa

SEQ ID NO: 2829 - RNA, 19 nt, Artificial Sequence
  Synthetic
cugagaagcugaacaaaua

SEQ ID NO: 2830 - RNA, 19 nt, Artificial Sequence
  Synthetic
ggaaauggcuucauccaaa

SEQ ID NO: 2831 - RNA, 19 nt, Artificial Sequence
  Synthetic
aagcuaagccugaaaguaa

SEQ ID NO: 2832 - RNA, 19 nt, Artificial Sequence
  Synthetic
cuuagaaacugcucagaaa

SEQ ID NO: 2833 - RNA, 19 nt, Artificial Sequence
  Synthetic
ggguaaaccugauaauaau

SEQ ID NO: 2834 - RNA, 19 nt, Artificial Sequence
  Synthetic
ucuuauugcuggacagaaa

SEQ ID NO: 2835 - RNA, 19 nt, Artificial Sequence
  Synthetic
acagaaagugauagugaaa

SEQ ID NO: 2836 - RNA, 19 nt, Artificial Sequence
  Synthetic
ucuaaugaaucuugagcaa

SEQ ID NO: 2837 - RNA, 19 nt, Artificial Sequence
  Synthetic
ccaggaaccuccaguaaua

SEQ ID NO: 2838 - RNA, 19 nt, Artificial Sequence
  Synthetic
gaugaagacgggagugaua

SEQ ID NO: 2839 - RNA, 19 nt, Artificial Sequence
  Synthetic
gcaaggaaggagagccaaa

SEQ ID NO: 2840 - RNA, 19 nt, Artificial Sequence
  Synthetic
cauugaagcauguggcaua

SEQ ID NO: 2841 - RNA, 19 nt, Artificial Sequence
  Synthetic
ccauuaagaccaagaauuu

SEQ ID NO: 2842 - RNA, 19 nt, Artificial Sequence
  Synthetic
ggaacuggguauugauaau

SEQ ID NO: 2843 - RNA, 19 nt, Artificial Sequence
  Synthetic
ggagagagagaccgggaaa

SEQ ID NO: 2844 - RNA, 19 nt, Artificial Sequence
  Synthetic
ggauagagacuuuagaaga

SEQ ID NO: 2845 - RNA, 19 nt, Artificial Sequence
  Synthetic
agggagagagaaagggaaa

SEQ ID NO: 2846 - RNA, 19 nt, Artificial Sequence
  Synthetic
caccaaaagaagaggaaaa

SEQ ID NO: 2847 - RNA, 19 nt, Artificial Sequence
  Synthetic
acagauuggaauuggguaa

SEQ ID NO: 2848 - RNA, 19 nt, Artificial Sequence
  Synthetic
ggagcaaagaggagagaaa

SEQ ID NO: 2849 - RNA, 19 nt, Artificial Sequence
  Synthetic
ggacaaucuuccugugaua

SEQ ID NO: 2850 - RNA, 19 nt, Artificial Sequence
  Synthetic
gaacagaagacuuugaaua

SEQ ID NO: 2851 - RNA, 19 nt, Artificial Sequence
  Synthetic
gcugagagcugcagaagua

SEQ ID NO: 2852 - RNA, 19 nt, Artificial Sequence
  Synthetic
gcaguuaauucaacagaaa

SEQ ID NO: 2853 - RNA, 19 nt, Artificial Sequence
  Synthetic
ccgaacagaugaugaagaa

SEQ ID NO: 2854 - RNA, 19 nt, Artificial Sequence
  Synthetic
ucgaaaucauggagaguau

SEQ ID NO: 2855 - RNA, 19 nt, Artificial Sequence
  Synthetic
guaaaguguagguggacaa

SEQ ID NO: 2856 - RNA, 19 nt, Artificial Sequence
  Synthetic
ggacagagcaguaaagagu

SEQ ID NO: 2857 - RNA, 19 nt, Artificial Sequence
  Synthetic
gaacagaugaugaagaaga

SEQ ID NO: 2858 - RNA, 19 nt, Artificial Sequence
  Synthetic
agacagaacagaagacuuu

SEQ ID NO: 2859 - RNA, 19 nt, Artificial Sequence
  Synthetic
gagaagaagcaguggccuu

SEQ ID NO: 2860 - RNA, 19 nt, Artificial Sequence
  Synthetic
gcaagaaggagaucaauau

SEQ ID NO: 2861 - RNA, 19 nt, Artificial Sequence
  Synthetic
cagaugaaagcuugcgaaa

SEQ ID NO: 2862 - RNA, 19 nt, Artificial Sequence
  Synthetic
gcuggaagaugaaaggaau

SEQ ID NO: 2863 - RNA, 19 nt, Artificial Sequence
  Synthetic
ugucuaacgaugaguguaa

SEQ ID NO: 2864 - RNA, 19 nt, Artificial Sequence
  Synthetic
acauugagcuugaguguca

SEQ ID NO: 2865 - RNA, 19 nt, Artificial Sequence
  Synthetic
gagcuugagugucagaaua

SEQ ID NO: 2866 - RNA, 19 nt, Artificial Sequence
  Synthetic
gaugaaagcuugcgaaaug

SEQ ID NO: 2867 - RNA, 19 nt, Artificial Sequence
  Synthetic
uguccagaaucgagaagaa

SEQ ID NO: 2868 - RNA, 19 nt, Artificial Sequence
  Synthetic
ggcaagaaggagaucaaua

SEQ ID NO: 2869 - RNA, 19 nt, Artificial Sequence
  Synthetic
uguuggaagaagagcauaa

SEQ ID NO: 2870 - RNA, 19 nt, Artificial Sequence
  Synthetic
cagcaagcuuccugaucaa

SEQ ID NO: 2871 - RNA, 19 nt, Artificial Sequence
  Synthetic
ggggaaagcuagaugacau

SEQ ID NO: 2872 - RNA, 19 nt, Artificial Sequence
  Synthetic
caaagagacccgugcgaga

SEQ ID NO: 2873 - RNA, 19 nt, Artificial Sequence
  Synthetic
gcgcugaaagcaaggagaa

SEQ ID NO: 2874 - RNA, 19 nt, Artificial Sequence
  Synthetic
ugagaaggacaguggagua

SEQ ID NO: 2875 - RNA, 19 nt, Artificial Sequence
  Synthetic
cagaagacuuugaauauga

SEQ ID NO: 2876 - RNA, 19 nt, Artificial Sequence
  Synthetic
ccagaugaggacugugaaa

SEQ ID NO: 2877 - RNA, 19 nt, Artificial Sequence
  Synthetic
ugagaaacauugagcuuga

SEQ ID NO: 2878 - RNA, 19 nt, Artificial Sequence
  Synthetic
gaacacaagcgcacgguaa

SEQ ID NO: 2879 - RNA, 19 nt, Artificial Sequence
  Synthetic
acgcaaagguggcucgaga

SEQ ID NO: 2880 - RNA, 19 nt, Artificial Sequence
  Synthetic
gagaagaugucccguguga

SEQ ID NO: 2881 - RNA, 19 nt, Artificial Sequence
  Synthetic
ccgacuaccugcuggguga

SEQ ID NO: 2882 - RNA, 19 nt, Artificial Sequence
  Synthetic
caaugaggauaacgaggaa

SEQ ID NO: 2883 - RNA, 19 nt, Artificial Sequence
  Synthetic
ccgagcaccugcaggacaa

SEQ ID NO: 2884 - RNA, 19 nt, Artificial Sequence
  Synthetic
cugacagacuccagugaau

SEQ ID NO: 2885 - RNA, 19 nt, Artificial Sequence
  Synthetic
gcgacaagauggugaaggu

SEQ ID NO: 2886 - RNA, 19 nt, Artificial Sequence
  Synthetic
gcugauuggcugauagaca

SEQ ID NO: 2887 - RNA, 19 nt, Artificial Sequence
  Synthetic
gugaggaggacgagcugua

SEQ ID NO: 2888 - RNA, 19 nt, Artificial Sequence
  Synthetic
uggacacagcugagcguua

SEQ ID NO: 2889 - RNA, 19 nt, Artificial Sequence
  Synthetic
ccaucuucuuuaagcgcaa

SEQ ID NO: 2890 - RNA, 19 nt, Artificial Sequence
  Synthetic
gcaaggacaucgacgagca

SEQ ID NO: 2891 - RNA, 19 nt, Artificial Sequence
  Synthetic
gugcagccauggagaagau

SEQ ID NO: 2892 - RNA, 19 nt, Artificial Sequence
  Synthetic
uguccaacgagguggucaa

SEQ ID NO: 2893 - RNA, 19 nt, Artificial Sequence
  Synthetic
ccgggaauguccagcuaga

SEQ ID NO: 2894 - RNA, 19 nt, Artificial Sequence
  Synthetic
gcgacaugcugcacuucua

SEQ ID NO: 2895 - RNA, 19 nt, Artificial Sequence
  Synthetic
cgguaaacaaagucugcuu

SEQ ID NO: 2896 - RNA, 19 nt, Artificial Sequence
  Synthetic
gcuuugaccuccgcagaaa

SEQ ID NO: 2897 - RNA, 19 nt, Artificial Sequence
  Synthetic
gggacgugcaguucaguau

SEQ ID NO: 2898 - RNA, 19 nt, Artificial Sequence
  Synthetic
gugaugggcuggacugaca

SEQ ID NO: 2899 - RNA, 19 nt, Artificial Sequence
  Synthetic
uggaaggugaggaggacga

SEQ ID NO: 2900 - RNA, 19 nt, Artificial Sequence
  Synthetic
ggcaccagauggaugagaa

SEQ ID NO: 2901 - RNA, 19 nt, Artificial Sequence
  Synthetic
ugggugaacgggugcgcaa

SEQ ID NO: 2902 - RNA, 19 nt, Artificial Sequence
  Synthetic
ugggugacguggaagguga

SEQ ID NO: 2903 - RNA, 19 nt, Artificial Sequence
  Synthetic
ccaaugaggauaacgagga

SEQ ID NO: 2904 - RNA, 19 nt, Artificial Sequence
  Synthetic
ggacacagcugagcguuau

SEQ ID NO: 2905 - RNA, 19 nt, Artificial Sequence
  Synthetic
uggugaaggucugggacau

SEQ ID NO: 2906 - RNA, 19 nt, Artificial Sequence
  Synthetic
ggaagucagacaugaaacu

SEQ ID NO: 2907 - RNA, 19 nt, Artificial Sequence
  Synthetic
ccaacgagguggucaagcu

SEQ ID NO: 2908 - RNA, 19 nt, Artificial Sequence
  Synthetic
ucgcagaccuggagcgcaa

SEQ ID NO: 2909 - RNA, 19 nt, Artificial Sequence
  Synthetic
gcaagaagagcgugaacau

SEQ ID NO: 2910 - RNA, 19 nt, Artificial Sequence
  Synthetic
gggcgaagaccaauacuua

SEQ ID NO: 2911 - RNA, 19 nt, Artificial Sequence
  Synthetic
ggaaggaggauguggccau

SEQ ID NO: 2912 - RNA, 19 nt, Artificial Sequence
  Synthetic
gcgcacaacggaaacaaua

SEQ ID NO: 2913 - RNA, 19 nt, Artificial Sequence
  Synthetic
gagaggagauugaggcgca

SEQ ID NO: 2914 - RNA, 19 nt, Artificial Sequence
  Synthetic
gggagaagccucagugcca

SEQ ID NO: 2915 - RNA, 19 nt, Artificial Sequence
  Synthetic
cggcaagguuguaaaauca

SEQ ID NO: 2916 - RNA, 19 nt, Artificial Sequence
  Synthetic
aagaagagcgugaacauga

SEQ ID NO: 2917 - RNA, 19 nt, Artificial Sequence
  Synthetic
caauaacaauaacggcaau

SEQ ID NO: 2918 - RNA, 19 nt, Artificial Sequence
  Synthetic
acaauaacaauaacggcaa

SEQ ID NO: 2919 - RNA, 19 nt, Artificial Sequence
  Synthetic
ggggagagacccuggauga

SEQ ID NO: 2920 - RNA, 19 nt, Artificial Sequence
  Synthetic
gggauaaggagccgguguu

SEQ ID NO: 2921 - RNA, 19 nt, Artificial Sequence
  Synthetic
acaauaacggcaaugggua

SEQ ID NO: 2922 - RNA, 19 nt, Artificial Sequence
  Synthetic
ccgugugcuucgagagcga

SEQ ID NO: 2923 - RNA, 19 nt, Artificial Sequence
  Synthetic
ccgcgcaagaagagcguga

SEQ ID NO: 2924 - RNA, 19 nt, Artificial Sequence
  Synthetic
gcgaagaccaauacuuaca

SEQ ID NO: 2925 - RNA, 19 nt, Artificial Sequence
  Synthetic
ggaauaagaacacggcacu

SEQ ID NO: 2926 - RNA, 19 nt, Artificial Sequence
  Synthetic
caacggaaacaauaacaau

SEQ ID NO: 2927 - RNA, 19 nt, Artificial Sequence
  Synthetic
cagcagacgcacacguaca

SEQ ID NO: 2928 - RNA, 19 nt, Artificial Sequence
  Synthetic
gcuuugcgcacaacggaaa

SEQ ID NO: 2929 - RNA, 19 nt, Artificial Sequence
  Synthetic
agaccaauacuuacaucaa

SEQ ID NO: 2930 - RNA, 19 nt, Artificial Sequence
  Synthetic
cgcacaacggaaacaauaa

SEQ ID NO: 2931 - RNA, 19 nt, Artificial Sequence
  Synthetic
cggaauaagaacacggcac

SEQ ID NO: 2932 - RNA, 19 nt, Artificial Sequence
  Synthetic
agaacgacuuccacgccaa

SEQ ID NO: 2933 - RNA, 19 nt, Artificial Sequence
  Synthetic
ccaaaggcgccacaaucaa

SEQ ID NO: 2934 - RNA, 19 nt, Artificial Sequence
  Synthetic
caauaacggcaauggguac

SEQ ID NO: 2935 - RNA, 19 nt, Artificial Sequence
  Synthetic
ggcaauggguacaccuaca

SEQ ID NO: 2936 - RNA, 19 nt, Artificial Sequence
  Synthetic
ucacagacgagaacgacuu

SEQ ID NO: 2937 - RNA, 19 nt, Artificial Sequence
  Synthetic
accaauacuuacaucaaga

SEQ ID NO: 2938 - RNA, 19 nt, Artificial Sequence
  Synthetic
aagagaagcagcagaggaa

SEQ ID NO: 2939 - RNA, 19 nt, Artificial Sequence
  Synthetic
cggcauggaucaggagaau

SEQ ID NO: 2940 - RNA, 19 nt, Artificial Sequence
  Synthetic
ccgcaacggcgaagcagaa

SEQ ID NO: 2941 - RNA, 19 nt, Artificial Sequence
  Synthetic
gcuucaaguaccucgaaua

SEQ ID NO: 2942 - RNA, 19 nt, Artificial Sequence
  Synthetic
gagaagggaccuccugaaa

SEQ ID NO: 2943 - RNA, 19 nt, Artificial Sequence
  Synthetic
ucaaguaccucgaauauga

SEQ ID NO: 2944 - RNA, 19 nt, Artificial Sequence
  Synthetic
cuucaaguaccucgaauau

SEQ ID NO: 2945 - RNA, 19 nt, Artificial Sequence
  Synthetic
ggacacaaguucugcuuuc

SEQ ID NO: 2946 - RNA, 19 nt, Artificial Sequence
  Synthetic
ccugaaaacucgcucuuua

SEQ ID NO: 2947 - RNA, 19 nt, Artificial Sequence
  Synthetic
gagugagcagaaaggcuua

SEQ ID NO: 2948 - RNA, 19 nt, Artificial Sequence
  Synthetic
cauccuugcuggagacauc

SEQ ID NO: 2949 - RNA, 19 nt, Artificial Sequence
  Synthetic
ugacagggccacaucauca

SEQ ID NO: 2950 - RNA, 19 nt, Artificial Sequence
  Synthetic
ucaaugugcgcuucaagaa

SEQ ID NO: 2951 - RNA, 19 nt, Artificial Sequence
  Synthetic
aaacgaggcaaaagcauuu

SEQ ID NO: 2952 - RNA, 19 nt, Artificial Sequence
  Synthetic
ugagaagggaccuccugaa

SEQ ID NO: 2953 - RNA, 19 nt, Artificial Sequence
  Synthetic
gcauggaucaggagaaugg

SEQ ID NO: 2954 - RNA, 19 nt, Artificial Sequence
  Synthetic
gaagggaccuccugaaaac

SEQ ID NO: 2955 - RNA, 19 nt, Artificial Sequence
  Synthetic
gaaaacucgcucuuuauaa

SEQ ID NO: 2956 - RNA, 19 nt, Artificial Sequence
  Synthetic
agaagaagauagagaaaga

SEQ ID NO: 2957 - RNA, 19 nt, Artificial Sequence
  Synthetic
gggaagaaacaaagaagaa

SEQ ID NO: 2958 - RNA, 19 nt, Artificial Sequence
  Synthetic
gagaagaggaaaugaagaa

SEQ ID NO: 2959 - RNA, 19 nt, Artificial Sequence
  Synthetic
agauagagaaagagaagaa

SEQ ID NO: 2960 - RNA, 19 nt, Artificial Sequence
  Synthetic
gcaaaggagagaagaggaa

SEQ ID NO: 2961 - RNA, 19 nt, Artificial Sequence
  Synthetic
gaaucaggauggcgaaaua

SEQ ID NO: 2962 - RNA, 19 nt, Artificial Sequence
  Synthetic
agaagagaggugugggaaa

SEQ ID NO: 2963 - RNA, 19 nt, Artificial Sequence
  Synthetic
ggagagaagaggaaaugaa

SEQ ID NO: 2964 - RNA, 19 nt, Artificial Sequence
  Synthetic
guaaguagccaaacaauaa

SEQ ID NO: 2965 - RNA, 19 nt, Artificial Sequence
  Synthetic
ccacaaaccuccauccuaa

SEQ ID NO: 2966 - RNA, 19 nt, Artificial Sequence
  Synthetic
caauaaccaaggagaauaa

SEQ ID NO: 2967 - RNA, 19 nt, Artificial Sequence
  Synthetic
ccaaggagaauaacagaaa

SEQ ID NO: 2968 - RNA, 19 nt, Artificial Sequence
  Synthetic
aaacaauaaccaaggagaa

SEQ ID NO: 2969 - RNA, 19 nt, Artificial Sequence
  Synthetic
acaaagaagaagauagaga

SEQ ID NO: 2970 - RNA, 19 nt, Artificial Sequence
  Synthetic
ggaaagaguuacugguacu

SEQ ID NO: 2971 - RNA, 19 nt, Artificial Sequence
  Synthetic
uggagaagauccuggagaa

SEQ ID NO: 2972 - RNA, 19 nt, Artificial Sequence
  Synthetic
uagacaaacuggagaagau

SEQ ID NO: 2973 - RNA, 19 nt, Artificial Sequence
  Synthetic
gaagagaggugugggaaau

SEQ ID NO: 2974 - RNA, 19 nt, Artificial Sequence
  Synthetic
gcacagaagcagaagaacu

SEQ ID NO: 2975 - RNA, 19 nt, Artificial Sequence
  Synthetic
agaaagagaagaaggaguu

SEQ ID NO: 2976 - RNA, 19 nt, Artificial Sequence
  Synthetic
gaagaaacaaagaagaaga

SEQ ID NO: 2977 - RNA, 19 nt, Artificial Sequence
  Synthetic
aaagaauguucgugaccaa

SEQ ID NO: 2978 - RNA, 19 nt, Artificial Sequence
  Synthetic
gaaacuagaagaagcagaa

SEQ ID NO: 2979 - RNA, 19 nt, Artificial Sequence
  Synthetic
gaacauugcuguacagacu

SEQ ID NO: 2980 - RNA, 19 nt, Artificial Sequence
  Synthetic
aagaggaaaugaagaauca

SEQ ID NO: 2981 - RNA, 19 nt, Artificial Sequence
  Synthetic
gagaaagagaagaaggagu

SEQ ID NO: 2982 - RNA, 19 nt, Artificial Sequence
  Synthetic
uggauagacucaagaauca

SEQ ID NO: 2983 - RNA, 19 nt, Artificial Sequence
  Synthetic
acaauaaagcgggaagaaa

SEQ ID NO: 2984 - RNA, 19 nt, Artificial Sequence
  Synthetic
gcacaaggaguguaucaaa

SEQ ID NO: 2985 - RNA, 19 nt, Artificial Sequence
  Synthetic
ggagaaaacuugauagcca

SEQ ID NO: 2986 - RNA, 19 nt, Artificial Sequence
  Synthetic
aggcaugcauucagggaaa

SEQ ID NO: 2987 - RNA, 19 nt, Artificial Sequence
  Synthetic
gcaaugaagcaauggagua

SEQ ID NO: 2988 - RNA, 19 nt, Artificial Sequence
  Synthetic
ggaugaugauucaguuaua

SEQ ID NO: 2989 - RNA, 19 nt, Artificial Sequence
  Synthetic
gaucuauuauggagagaau

SEQ ID NO: 2990 - RNA, 19 nt, Artificial Sequence
  Synthetic
gcagguaccuauaugauaa

SEQ ID NO: 2991 - RNA, 19 nt, Artificial Sequence
  Synthetic
ggccaaauaucaaggugaa

SEQ ID NO: 2992 - RNA, 19 nt, Artificial Sequence
  Synthetic
gugauaacccaaaggcuaa

SEQ ID NO: 2993 - RNA, 19 nt, Artificial Sequence
  Synthetic
gauuauaaccggagauucu

SEQ ID NO: 2994 - RNA, 19 nt, Artificial Sequence
  Synthetic
gcugaaacugaaagaagaa

SEQ ID NO: 2995 - RNA, 19 nt, Artificial Sequence
  Synthetic
gagaacagcuucaaacaga

SEQ ID NO: 2996 - RNA, 19 nt, Artificial Sequence
  Synthetic
ggagagaauuauggaucua

SEQ ID NO: 2997 - RNA, 19 nt, Artificial Sequence
  Synthetic
agugauaacccaaaggcua

SEQ ID NO: 2998 - RNA, 19 nt, Artificial Sequence
  Synthetic
augaagcaauggaguauua

SEQ ID NO: 2999 - RNA, 19 nt, Artificial Sequence
  Synthetic
cgggagcgguccuggaaau

SEQ ID NO: 3000 - RNA, 19 nt, Artificial Sequence
  Synthetic
guuuggaauucuaggcuuu

SEQ ID NO: 3001 - RNA, 19 nt, Artificial Sequence
  Synthetic
guauaaagcaaugaagcaa

SEQ ID NO: 3002 - RNA, 19 nt, Artificial Sequence
  Synthetic
ccuaacaguauuuggugaa

SEQ ID NO: 3003 - RNA, 19 nt, Artificial Sequence
  Synthetic
ugagauugcaucaggauau

SEQ ID NO: 3004 - RNA, 19 nt, Artificial Sequence
  Synthetic
gaaacuggaugaugauuca

SEQ ID NO: 3005 - RNA, 19 nt, Artificial Sequence
  Synthetic
gcgauaugguucauggcuu

SEQ ID NO: 3006 - RNA, 19 nt, Artificial Sequence
  Synthetic
caaugaagcaauggaguau

SEQ ID NO: 3007 - RNA, 19 nt, Artificial Sequence
  Synthetic
uaucugagcuaauguagaa

SEQ ID NO: 3008 - RNA, 19 nt, Artificial Sequence
  Synthetic
ccugaagccuuguuuggaa

SEQ ID NO: 3009 - RNA, 19 nt, Artificial Sequence
  Synthetic
uggaauggccaaauaucaa

SEQ ID NO: 3010 - RNA, 19 nt, Artificial Sequence
  Synthetic
uggcaguuguggucaguuu

SEQ ID NO: 3011 - RNA, 19 nt, Artificial Sequence
  Synthetic
agaaggaguaagcgaccaa

SEQ ID NO: 3012 - RNA, 19 nt, Artificial Sequence
  Synthetic
cugugaaacucaucuaaau

SEQ ID NO: 3013 - RNA, 19 nt, Artificial Sequence
  Synthetic
gagcgguccuggaaauaau

SEQ ID NO: 3014 - RNA, 19 nt, Artificial Sequence
  Synthetic
gaucacaaggucaggagau

SEQ ID NO: 3015 - RNA, 19 nt, Artificial Sequence
  Synthetic
uguagaacaucaaacagaa

SEQ ID NO: 3016 - RNA, 19 nt, Artificial Sequence
  Synthetic
ggagauagccaaugagaua

SEQ ID NO: 3017 - RNA, 19 nt, Artificial Sequence
  Synthetic
caacuaaggauuaaggaaa

SEQ ID NO: 3018 - RNA, 19 nt, Artificial Sequence
  Synthetic
ugaaauaaacccaaggaaa

SEQ ID NO: 3019 - RNA, 19 nt, Artificial Sequence
  Synthetic
gguuauauuuguuggagaa

SEQ ID NO: 3020 - RNA, 19 nt, Artificial Sequence
  Synthetic
ugaaagagcugguucuaaa

SEQ ID NO: 3021 - RNA, 19 nt, Artificial Sequence
  Synthetic
ggaaguauuucacgaauua

SEQ ID NO: 3022 - RNA, 19 nt, Artificial Sequence
  Synthetic
gaucaaagcuuuucacauu

SEQ ID NO: 3023 - RNA, 19 nt, Artificial Sequence
  Synthetic
guacaagaauugauagaca

SEQ ID NO: 3024 - RNA, 19 nt, Artificial Sequence
  Synthetic
gggaauuauuggauccuaa

SEQ ID NO: 3025 - RNA, 19 nt, Artificial Sequence
  Synthetic
caaggaagguggaguguuu

SEQ ID NO: 3026 - RNA, 19 nt, Artificial Sequence
  Synthetic
gaggaaacauuuugucuua

SEQ ID NO: 3027 - RNA, 19 nt, Artificial Sequence
  Synthetic
agacacagcuguuaacaaa

SEQ ID NO: 3028 - RNA, 19 nt, Artificial Sequence
  Synthetic
ggguggaauugaugaagaa

SEQ ID NO: 3029 - RNA, 19 nt, Artificial Sequence
  Synthetic
acauaggguaaaugagaaa

SEQ ID NO: 3030 - RNA, 19 nt, Artificial Sequence
  Synthetic
ggaaggaacuggaaaagaa

SEQ ID NO: 3031 - RNA, 19 nt, Artificial Sequence
  Synthetic
gggaaguauuucacgaauu

SEQ ID NO: 3032 - RNA, 19 nt, Artificial Sequence
  Synthetic
uggagaagcucauacguua

SEQ ID NO: 3033 - RNA, 19 nt, Artificial Sequence
  Synthetic
caacaaguuuggucagcua

SEQ ID NO: 3034 - RNA, 19 nt, Artificial Sequence
  Synthetic
cuaaugguguuaugaguua

SEQ ID NO: 3035 - RNA, 19 nt, Artificial Sequence
  Synthetic
gaucaguaaugaagguaca

SEQ ID NO: 3036 - RNA, 19 nt, Artificial Sequence
  Synthetic
agaagaugacauagaggaa

SEQ ID NO: 3037 - RNA, 19 nt, Artificial Sequence
  Synthetic
guauaagccucuuucauua

SEQ ID NO: 3038 - RNA, 19 nt, Artificial Sequence
  Synthetic
ugagauagauggaacguuu

SEQ ID NO: 3039 - RNA, 19 nt, Artificial Sequence
  Synthetic
gaaauaaacccaaggaaag

SEQ ID NO: 3040 - RNA, 19 nt, Artificial Sequence
  Synthetic
agagaugguuagccagaaa

SEQ ID NO: 3041 - RNA, 19 nt, Artificial Sequence
  Synthetic
gcauugagguuuuaucuua

SEQ ID NO: 3042 - RNA, 19 nt, Artificial Sequence
  Synthetic
ugaaagaacuaaugccuga

SEQ ID NO: 3043 - RNA, 19 nt, Artificial Sequence
  Synthetic
gaaauacuacauaggguaa

SEQ ID NO: 3044 - RNA, 19 nt, Artificial Sequence
  Synthetic
gagaaaauauuguaggaga

SEQ ID NO: 3045 - RNA, 19 nt, Artificial Sequence
  Synthetic
aaaccaaugcucagauuua

SEQ ID NO: 3046 - RNA, 19 nt, Artificial Sequence
  Synthetic
ggaagaaacucaagggcaa

SEQ ID NO: 3047 - RNA, 19 nt, Artificial Sequence
  Synthetic
ggacgaagaccaagaggaa

SEQ ID NO: 3048 - RNA, 19 nt, Artificial Sequence
  Synthetic
ccaaagagcaacugaaaca

SEQ ID NO: 3049 - RNA, 19 nt, Artificial Sequence
  Synthetic
ccacuaaacggguuggaua

SEQ ID NO: 3050 - RNA, 19 nt, Artificial Sequence
  Synthetic
ggaaacggcuccagcggaa

SEQ ID NO: 3051 - RNA, 19 nt, Artificial Sequence
  Synthetic
ccaaugaacuucugaacau

SEQ ID NO: 3052 - RNA, 19 nt, Artificial Sequence
  Synthetic
acgaagaccaagaggaaga

SEQ ID NO: 3053 - RNA, 19 nt, Artificial Sequence
  Synthetic
ccauuugccuggaugaaua

SEQ ID NO: 3054 - RNA, 19 nt, Artificial Sequence
  Synthetic
cugaacaugguguggaaua

SEQ ID NO: 3055 - RNA, 19 nt, Artificial Sequence
  Synthetic
gguguggaauagugaggaa

SEQ ID NO: 3056 - RNA, 19 nt, Artificial Sequence
  Synthetic
gcaagaggagggugaugaa

SEQ ID NO: 3057 - RNA, 19 nt, Artificial Sequence
  Synthetic
ggucaaugggucagucuuu

SEQ ID NO: 3058 - RNA, 19 nt, Artificial Sequence
  Synthetic
caugggagcaguaaugaua

SEQ ID NO: 3059 - RNA, 19 nt, Artificial Sequence
  Synthetic
ccagaaaaggauacauuua

SEQ ID NO: 3060 - RNA, 19 nt, Artificial Sequence
  Synthetic
ucgacuuaccaaagagcaa

SEQ ID NO: 3061 - RNA, 19 nt, Artificial Sequence
  Synthetic
aggaagaaacucaagggca

SEQ ID NO: 3062 - RNA, 19 nt, Artificial Sequence
  Synthetic
gcggaaucgacuuaccaaa

SEQ ID NO: 3063 - RNA, 19 nt, Artificial Sequence
  Synthetic
gugaggaaauccagcagca

SEQ ID NO: 3064 - RNA, 19 nt, Artificial Sequence
  Synthetic
uguggaauagugaggaaau

SEQ ID NO: 3065 - RNA, 19 nt, Artificial Sequence
  Synthetic
agaccaagaggaagaaacu

SEQ ID NO: 3066 - RNA, 19 nt, Artificial Sequence
  Synthetic
augacuaucagaagggaga

SEQ ID NO: 3067 - RNA, 19 nt, Artificial Sequence
  Synthetic
caacugaaacagauuccua

SEQ ID NO: 3068 - RNA, 19 nt, Artificial Sequence
  Synthetic
aggaaauccagcagcagau

SEQ ID NO: 3069 - RNA, 19 nt, Artificial Sequence
  Synthetic
gcugaaagcggccugauuu

SEQ ID NO: 3070 - RNA, 19 nt, Artificial Sequence
  Synthetic
uaccaaagagcaacugaaa

SEQ ID NO: 3071 - RNA, 19 nt, Artificial Sequence
  Synthetic
gaggaaauccagcagcaga

SEQ ID NO: 3072 - RNA, 19 nt, Artificial Sequence
  Synthetic
gggacgaagaccaagagga

SEQ ID NO: 3073 - RNA, 19 nt, Artificial Sequence
  Synthetic
guaugaugucugugccauu

SEQ ID NO: 3074 - RNA, 19 nt, Artificial Sequence
  Synthetic
gaaacagauuccuacacau

SEQ ID NO: 3075 - RNA, 19 nt, Artificial Sequence
  Synthetic
gcuauuaccucaucccuuu

SEQ ID NO: 3076 - RNA, 19 nt, Artificial Sequence
  Synthetic
gcaaggagaucaagaagaa

SEQ ID NO: 3077 - RNA, 19 nt, Artificial Sequence
  Synthetic
uggcgaaggucaagaacaa

SEQ ID NO: 3078 - RNA, 19 nt, Artificial Sequence
  Synthetic
acaaaggacugcugccaaa

SEQ ID NO: 3079 - RNA, 19 nt, Artificial Sequence
  Synthetic
gagaggagcccaagugcaa

SEQ ID NO: 3080 - RNA, 19 nt, Artificial Sequence
  Synthetic
ggguacagagcaagaagaa

SEQ ID NO: 3081 - RNA, 19 nt, Artificial Sequence
  Synthetic
guacagagcaagaagaagu

SEQ ID NO: 3082 - RNA, 19 nt, Artificial Sequence
  Synthetic
ggaaguguggccuggguua

SEQ ID NO: 3083 - RNA, 19 nt, Artificial Sequence
  Synthetic
gggagaaguaccagguguu

SEQ ID NO: 3084 - RNA, 19 nt, Artificial Sequence
  Synthetic
gcagaaaaggcgaguuuau

SEQ ID NO: 3085 - RNA, 19 nt, Artificial Sequence
  Synthetic
ggaaagagcaagccugguu

SEQ ID NO: 3086 - RNA, 19 nt, Artificial Sequence
  Synthetic
ggucagcagcucuaagcaa

SEQ ID NO: 3087 - RNA, 19 nt, Artificial Sequence
  Synthetic
gagcugcguaagagaggaa

SEQ ID NO: 3088 - RNA, 19 nt, Artificial Sequence
  Synthetic
ugaagauggugcuguccua

SEQ ID NO: 3089 - RNA, 19 nt, Artificial Sequence
  Synthetic
agaacaacuucaaagacuu

SEQ ID NO: 3090 - RNA, 19 nt, Artificial Sequence
  Synthetic
gcaagaagaaguacuuuga

SEQ ID NO: 3091 - RNA, 19 nt, Artificial Sequence
  Synthetic
gcggcaaggagaucaagaa

SEQ ID NO: 3092 - RNA, 19 nt, Artificial Sequence
  Synthetic
gggcacuccuacaauguca

SEQ ID NO: 3093 - RNA, 19 nt, Artificial Sequence
  Synthetic
ccaaguacaaguucaucuc

SEQ ID NO: 3094 - RNA, 19 nt, Artificial Sequence
  Synthetic
gccugcagauucucuacga

SEQ ID NO: 3095 - RNA, 19 nt, Artificial Sequence
  Synthetic
uguccugccugcacucugu

SEQ ID NO: 3096 - RNA, 19 nt, Artificial Sequence
  Synthetic
ugugggcacuccuacaaug

SEQ ID NO: 3097 - RNA, 19 nt, Artificial Sequence
  Synthetic
agaagaagauugagcugaa

SEQ ID NO: 3098 - RNA, 19 nt, Artificial Sequence
  Synthetic
gggccaaaggaaaggcaua

SEQ ID NO: 3099 - RNA, 19 nt, Artificial Sequence
  Synthetic
uggaagacuuggaggauga

SEQ ID NO: 3100 - RNA, 19 nt, Artificial Sequence
  Synthetic
cauuauggacugucagaaa

SEQ ID NO: 3101 - RNA, 19 nt, Artificial Sequence
  Synthetic
aggaagaaacggagacuca

SEQ ID NO: 3102 - RNA, 19 nt, Artificial Sequence
  Synthetic
agaacagggccaaaggaaa

SEQ ID NO: 3103 - RNA, 19 nt, Artificial Sequence
  Synthetic
gggcauggacagagccuuu

SEQ ID NO: 3104 - RNA, 19 nt, Artificial Sequence
  Synthetic
agauugagcugaaggagga

SEQ ID NO: 3105 - RNA, 19 nt, Artificial Sequence
  Synthetic
gaacagggccaaaggaaag

SEQ ID NO: 3106 - RNA, 19 nt, Artificial Sequence
  Synthetic
aguacaagaucgacuguga

SEQ ID NO: 3107 - RNA, 19 nt, Artificial Sequence
  Synthetic
ugaaggaggaggagaccau

SEQ ID NO: 3108 - RNA, 19 nt, Artificial Sequence
  Synthetic
aaggaaaggcauauggcau

SEQ ID NO: 3109 - RNA, 19 nt, Artificial Sequence
  Synthetic
ggaaacacacagccaagaa

SEQ ID NO: 3110 - RNA, 19 nt, Artificial Sequence
  Synthetic
aagaacagggccaaaggaa

SEQ ID NO: 3111 - RNA, 19 nt, Artificial Sequence
  Synthetic
cgggacagauuuacacgua

SEQ ID NO: 3112 - RNA, 19 nt, Artificial Sequence
  Synthetic
aggaaaaggcuucugcuua

SEQ ID NO: 3113 - RNA, 19 nt, Artificial Sequence
  Synthetic
cccugaggcacaaaggaaa

SEQ ID NO: 3114 - RNA, 19 nt, Artificial Sequence
  Synthetic
gaggaagaacagggccaaa

SEQ ID NO: 3115 - RNA, 19 nt, Artificial Sequence
  Synthetic
aggaggaagaacagggcca

SEQ ID NO: 3116 - RNA, 19 nt, Artificial Sequence
  Synthetic
ggccaaaggaaaggcauau

SEQ ID NO: 3117 - RNA, 19 nt, Artificial Sequence
  Synthetic
ggaaaaggcuucugcuuac

SEQ ID NO: 3118 - RNA, 19 nt, Artificial Sequence
  Synthetic
gcccagaacaacugcuaca

SEQ ID NO: 3119 - RNA, 19 nt, Artificial Sequence
  Synthetic
guacaagaucgacugugaa

SEQ ID NO: 3120 - RNA, 19 nt, Artificial Sequence
  Synthetic
aaggaggaggagaccauua

SEQ ID NO: 3121 - RNA, 19 nt, Artificial Sequence
  Synthetic
agacuuggaggaugacauu

SEQ ID NO: 3122 - RNA, 19 nt, Artificial Sequence
  Synthetic
caagaucgacugugaagca

SEQ ID NO: 3123 - RNA, 19 nt, Artificial Sequence
  Synthetic
cagaacaacugcuacaucu

SEQ ID NO: 3124 - RNA, 19 nt, Artificial Sequence
  Synthetic
ccucgaggcucuacugugu

SEQ ID NO: 3125 - RNA, 19 nt, Artificial Sequence
  Synthetic
ggaagaaacggagacucaa

SEQ ID NO: 3126 - RNA, 19 nt, Artificial Sequence
  Synthetic
guaugucugugauaaguuu

SEQ ID NO: 3127 - RNA, 19 nt, Artificial Sequence
  Synthetic
aggaggagggcgaggacaa

SEQ ID NO: 3128 - RNA, 19 nt, Artificial Sequence
  Synthetic
ggaccuguugaaagagaaa

SEQ ID NO: 3129 - RNA, 19 nt, Artificial Sequence
  Synthetic
ugaugaagacuaugaagaa

SEQ ID NO: 3130 - RNA, 19 nt, Artificial Sequence
  Synthetic
ccggaguagcccagagcaa

SEQ ID NO: 3131 - RNA, 19 nt, Artificial Sequence
  Synthetic
cggcugugguggagaaugu

SEQ ID NO: 3132 - RNA, 19 nt, Artificial Sequence
  Synthetic
ccucgaugaugaagacuau

SEQ ID NO: 3133 - RNA, 19 nt, Artificial Sequence
  Synthetic
cagaugacuuccuggauga

SEQ ID NO: 3134 - RNA, 19 nt, Artificial Sequence
  Synthetic
aggggaaauccaaggguaa

SEQ ID NO: 3135 - RNA, 19 nt, Artificial Sequence
  Synthetic
gcgaguuuccugugaccaa

SEQ ID NO: 3136 - RNA, 19 nt, Artificial Sequence
  Synthetic
acaaagaugccauggagca

SEQ ID NO: 3137 - RNA, 19 nt, Artificial Sequence
  Synthetic
gagcaguacuacaaagaug

SEQ ID NO: 3138 - RNA, 19 nt, Artificial Sequence
  Synthetic
uggcggcagugaagacaua

SEQ ID NO: 3139 - RNA, 19 nt, Artificial Sequence
  Synthetic
ccaacagucgagcgcgaaa

SEQ ID NO: 3140 - RNA, 19 nt, Artificial Sequence
  Synthetic
augaagacuaugaagaaga

SEQ ID NO: 3141 - RNA, 19 nt, Artificial Sequence
  Synthetic
gaccaacagucgagcgcga

SEQ ID NO: 3142 - RNA, 19 nt, Artificial Sequence
  Synthetic
cugugacauuuguggaaaa

SEQ ID NO: 3143 - RNA, 19 nt, Artificial Sequence
  Synthetic
gcccuaugccugugacauu

SEQ ID NO: 3144 - RNA, 19 nt, Artificial Sequence
  Synthetic
uggcaguaguuuagaggcu

SEQ ID NO: 3145 - RNA, 19 nt, Artificial Sequence
  Synthetic
cagaccagacccugaagaa

SEQ ID NO: 3146 - RNA, 19 nt, Artificial Sequence
  Synthetic
gcccagagcaauuguuaca

SEQ ID NO: 3147 - RNA, 19 nt, Artificial Sequence
  Synthetic
agggcgaggacaaggaaga

SEQ ID NO: 3148 - RNA, 19 nt, Artificial Sequence
  Synthetic
gggagcaguacuacaaaga

SEQ ID NO: 3149 - RNA, 19 nt, Artificial Sequence
  Synthetic
uggagaauguagugaagcu

SEQ ID NO: 3150 - RNA, 19 nt, Artificial Sequence
  Synthetic
ccacauggcauuugggaaa

SEQ ID NO: 3151 - RNA, 19 nt, Artificial Sequence
  Synthetic
ggaaugaagaagaggauuu

SEQ ID NO: 3152 - RNA, 19 nt, Artificial Sequence
  Synthetic
gagaaaugccuaugaaaga

SEQ ID NO: 3153 - RNA, 19 nt, Artificial Sequence
  Synthetic
aggaaagcauccaggaaau

SEQ ID NO: 3154 - RNA, 19 nt, Artificial Sequence
  Synthetic
gaggaaagcauccaggaaa

SEQ ID NO: 3155 - RNA, 19 nt, Artificial Sequence
  Synthetic
aagaagaggauuuggaaga

SEQ ID NO: 3156 - RNA, 19 nt, Artificial Sequence
  Synthetic
caggaaauacagaggguuu

SEQ ID NO: 3157 - RNA, 19 nt, Artificial Sequence
  Synthetic
guugacagcauuaggaaua

SEQ ID NO: 3158 - RNA, 19 nt, Artificial Sequence
  Synthetic
agaagaagggaaugaagaa

SEQ ID NO: 3159 - RNA, 19 nt, Artificial Sequence
  Synthetic
auacagaggguuuuggaaa

SEQ ID NO: 3160 - RNA, 19 nt, Artificial Sequence
  Synthetic
caacaguggcguauaggaa

SEQ ID NO: 3161 - RNA, 19 nt, Artificial Sequence
  Synthetic
aaauguagaagaagggaau

SEQ ID NO: 3162 - RNA, 19 nt, Artificial Sequence
  Synthetic
gcagaugggucaugcuuuu

SEQ ID NO: 3163 - RNA, 19 nt, Artificial Sequence
  Synthetic
aggauuuggaagaggauau

SEQ ID NO: 3164 - RNA, 19 nt, Artificial Sequence
  Synthetic
gagagaaaugccuaugaaa

SEQ ID NO: 3165 - RNA, 19 nt, Artificial Sequence
  Synthetic
aggauauucccaagcgaaa

SEQ ID NO: 3166 - RNA, 19 nt, Artificial Sequence
  Synthetic
aagcgaaaggacaggacua

SEQ ID NO: 3167 - RNA, 19 nt, Artificial Sequence
  Synthetic
agauuucagcuuugaguua

SEQ ID NO: 3168 - RNA, 19 nt, Artificial Sequence
  Synthetic
gaucagaggcagaaaauga

SEQ ID NO: 3169 - RNA, 19 nt, Artificial Sequence
  Synthetic
ggaaagcauccaggaaaua

SEQ ID NO: 3170 - RNA, 19 nt, Artificial Sequence
  Synthetic
cacggaagguguaaguaua

SEQ ID NO: 3171 - RNA, 19 nt, Artificial Sequence
  Synthetic
gggaagcaacaguggcgua

SEQ ID NO: 3172 - RNA, 19 nt, Artificial Sequence
  Synthetic
ggaggaaagcauccaggaa

SEQ ID NO: 3173 - RNA, 19 nt, Artificial Sequence
  Synthetic
cauaaaggaaugaccaaga

SEQ ID NO: 3174 - RNA, 19 nt, Artificial Sequence
  Synthetic
cagagcugcuuguggguuu

SEQ ID NO: 3175 - RNA, 19 nt, Artificial Sequence
  Synthetic
cugaugagaugaagaaugu

SEQ ID NO: 3176 - RNA, 19 nt, Artificial Sequence
  Synthetic
aagaagggaaugaagaaga

SEQ ID NO: 3177 - RNA, 19 nt, Artificial Sequence
  Synthetic
gcaagagcaugaaaauaua

SEQ ID NO: 3178 - RNA, 19 nt, Artificial Sequence
  Synthetic
guugaagaagccuaaauua

SEQ ID NO: 3179 - RNA, 19 nt, Artificial Sequence
  Synthetic
uagaagaagggaaugaaga

SEQ ID NO: 3180 - RNA, 19 nt, Artificial Sequence
  Synthetic
gggaagaaguucaccgcaa

SEQ ID NO: 3181 - RNA, 19 nt, Artificial Sequence
  Synthetic
gugaagaacuugaauggua

SEQ ID NO: 3182 - RNA, 19 nt, Artificial Sequence
  Synthetic
cagagagaacccagaguua

SEQ ID NO: 3183 - RNA, 19 nt, Artificial Sequence
  Synthetic
gaacagggaccaagagaca

SEQ ID NO: 3184 - RNA, 19 nt, Artificial Sequence
  Synthetic
ggaacgagauccaccacaa

SEQ ID NO: 3185 - RNA, 19 nt, Artificial Sequence
  Synthetic
gagagaacccagaguuaga

SEQ ID NO: 3186 - RNA, 19 nt, Artificial Sequence
  Synthetic
ccaagaagaagcaccuuaa

SEQ ID NO: 3187 - RNA, 19 nt, Artificial Sequence
  Synthetic
gauacaugcagaaggugaa

SEQ ID NO: 3188 - RNA, 19 nt, Artificial Sequence
  Synthetic
gaagauacaugcagaaggu

SEQ ID NO: 3189 - RNA, 19 nt, Artificial Sequence
  Synthetic
ccgcacucccggugaagaa

SEQ ID NO: 3190 - RNA, 19 nt, Artificial Sequence
  Synthetic
guucgaagauacaugcaga

SEQ ID NO: 3191 - RNA, 19 nt, Artificial Sequence
  Synthetic
agaacgugcugaaggagga

SEQ ID NO: 3192 - RNA, 19 nt, Artificial Sequence
  Synthetic
gccgcaagaccaagaagaa

SEQ ID NO: 3193 - RNA, 19 nt, Artificial Sequence
  Synthetic
gcauggacggccuacgaua

SEQ ID NO: 3194 - RNA, 19 nt, Artificial Sequence
  Synthetic
agauacaugcagaagguga

SEQ ID NO: 3195 - RNA, 19 nt, Artificial Sequence
  Synthetic
ggaugugguucgaagauac

SEQ ID NO: 3196 - RNA, 19 nt, Artificial Sequence
  Synthetic
gauccaaccucacgggcca

SEQ ID NO: 3197 - RNA, 19 nt, Artificial Sequence
  Synthetic
cggccuacgauauggacau

SEQ ID NO: 3198 - RNA, 19 nt, Artificial Sequence
  Synthetic
acauugagaacgugcugaa

SEQ ID NO: 3199 - RNA, 19 nt, Artificial Sequence
  Synthetic
gggaacagggaccaagaga

SEQ ID NO: 3200 - RNA, 19 nt, Artificial Sequence
  Synthetic
gggaguggcugaaugagca

SEQ ID NO: 3201 - RNA, 19 nt, Artificial Sequence
  Synthetic
uagacaacgugcuggcuga

SEQ ID NO: 3202 - RNA, 19 nt, Artificial Sequence
  Synthetic
aggaugugguucgaagaua

SEQ ID NO: 3203 - RNA, 19 nt, Artificial Sequence
  Synthetic
gggugugccgcaagaccaa

SEQ ID NO: 3204 - RNA, 19 nt, Artificial Sequence
  Synthetic
uugagaacgugcugaagga

SEQ ID NO: 3205 - RNA, 19 nt, Artificial Sequence
  Synthetic
gcaagggcaucguguggga

SEQ ID NO: 3206 - RNA, 19 nt, Artificial Sequence
  Synthetic
gaccaagagacaacacaga

SEQ ID NO: 3207 - RNA, 19 nt, Artificial Sequence
  Synthetic
gagcaagagcgacgugaag

SEQ ID NO: 3208 - RNA, 19 nt, Artificial Sequence
  Synthetic
gauauggacaucugcauca

SEQ ID NO: 3209 - RNA, 19 nt, Artificial Sequence
  Synthetic
gagaacccagaguuagaaa

SEQ ID NO: 3210 - RNA, 19 nt, Artificial Sequence
  Synthetic
guuaagagauugaggaaaa

SEQ ID NO: 3211 - RNA, 19 nt, Artificial Sequence
  Synthetic
agggaaagauggagguauu

SEQ ID NO: 3212 - RNA, 19 nt, Artificial Sequence
  Synthetic
agacagagauggaccgcaa

SEQ ID NO: 3213 - RNA, 19 nt, Artificial Sequence
  Synthetic
gcaaccagcucguggacuu

SEQ ID NO: 3214 - RNA, 19 nt, Artificial Sequence
  Synthetic
caguuaagagauugaggaa

SEQ ID NO: 3215 - RNA, 19 nt, Artificial Sequence
  Synthetic
ggaccauccucauaguuua

SEQ ID NO: 3216 - RNA, 19 nt, Artificial Sequence
  Synthetic
ccaaagaagucaagaucug

SEQ ID NO: 3217 - RNA, 19 nt, Artificial Sequence
  Synthetic
guucacugccagaggguuu

SEQ ID NO: 3218 - RNA, 19 nt, Artificial Sequence
  Synthetic
ccucauaguuuacagcauu

SEQ ID NO: 3219 - RNA, 19 nt, Artificial Sequence
  Synthetic
gcgaugugacugacagcaa

SEQ ID NO: 3220 - RNA, 19 nt, Artificial Sequence
  Synthetic
agccagagcaggucauaaa

SEQ ID NO: 3221 - RNA, 19 nt, Artificial Sequence
  Synthetic
caacaagacuuccagcuuu

SEQ ID NO: 3222 - RNA, 19 nt, Artificial Sequence
  Synthetic
gcagaagggccaacguuuu

SEQ ID NO: 3223 - RNA, 19 nt, Artificial Sequence
  Synthetic
cagcaagccuuucagauuu

SEQ ID NO: 3224 - RNA, 19 nt, Artificial Sequence
  Synthetic
gagauggaccgcaacauua

SEQ ID NO: 3225 - RNA, 19 nt, Artificial Sequence
  Synthetic
ggguacaacuacacuguca

SEQ ID NO: 3226 - RNA, 19 nt, Artificial Sequence
  Synthetic
aguuaagagauugaggaaa

SEQ ID NO: 3227 - RNA, 19 nt, Artificial Sequence
  Synthetic
cggcaauaaggauggaagu

SEQ ID NO: 3228 - RNA, 19 nt, Artificial Sequence
  Synthetic
gggaaagauggagguauua

SEQ ID NO: 3229 - RNA, 19 nt, Artificial Sequence
  Synthetic
acaacuacacugucaacua

SEQ ID NO: 3230 - RNA, 19 nt, Artificial Sequence
  Synthetic
agccagagccagagccaga

SEQ ID NO: 3231 - RNA, 19 nt, Artificial Sequence
  Synthetic
ccaacuaccugcagaacgu

SEQ ID NO: 3232 - RNA, 19 nt, Artificial Sequence
  Synthetic
gugacuaucuggagcagca

SEQ ID NO: 3233 - RNA, 19 nt, Artificial Sequence
  Synthetic
ugaccaaccucccugcaua

SEQ ID NO: 3234 - RNA, 19 nt, Artificial Sequence
  Synthetic
ccgcaagguccuagagcuc

SEQ ID NO: 3235 - RNA, 19 nt, Artificial Sequence
  Synthetic
gugacugacagcaaggcaa

SEQ ID NO: 3236 - RNA, 19 nt, Artificial Sequence
  Synthetic
gaggaaaauguccgugaaa

SEQ ID NO: 3237 - RNA, 19 nt, Artificial Sequence
  Synthetic
ucagcaagccuuucagauu

SEQ ID NO: 3238 - RNA, 19 nt, Artificial Sequence
  Synthetic
ccgagaggcugggagguuu

SEQ ID NO: 3239 - RNA, 19 nt, Artificial Sequence
  Synthetic
aggcagagaaagagcugaa

SEQ ID NO: 3240 - RNA, 19 nt, Artificial Sequence
  Synthetic
cagaagagcaggagagcac

SEQ ID NO: 3241 - RNA, 19 nt, Artificial Sequence
  Synthetic
caagaggagcugagagcga

SEQ ID NO: 3242 - RNA, 19 nt, Artificial Sequence
  Synthetic
gagcugagagcgaagggua

SEQ ID NO: 3243 - RNA, 19 nt, Artificial Sequence
  Synthetic
ugaagaaagcucagaggca

SEQ ID NO: 3244 - RNA, 19 nt, Artificial Sequence
  Synthetic
gggaggaggcagaagagca

SEQ ID NO: 3245 - RNA, 19 nt, Artificial Sequence
  Synthetic
guccaugaccacagggaga

SEQ ID NO: 3246 - RNA, 19 nt, Artificial Sequence
  Synthetic
gcaacaaggugcugacccu

SEQ ID NO: 3247 - RNA, 19 nt, Artificial Sequence
  Synthetic
augggcagcuggugggcaa

SEQ ID NO: 3248 - RNA, 19 nt, Artificial Sequence
  Synthetic
ugugggacuuccugagcaa

SEQ ID NO: 3249 - RNA, 19 nt, Artificial Sequence
  Synthetic
ccacaagaccagcugcaca

SEQ ID NO: 3250 - RNA, 19 nt, Artificial Sequence
  Synthetic
uguccaagcccguguggga

SEQ ID NO: 3251 - RNA, 19 nt, Artificial Sequence
  Synthetic
cugcaagaacaaagugacu

SEQ ID NO: 3252 - RNA, 19 nt, Artificial Sequence
  Synthetic
gggaauggcugaacgagca

SEQ ID NO: 3253 - RNA, 19 nt, Artificial Sequence
  Synthetic
ggacagcgagaaagggaga

SEQ ID NO: 3254 - RNA, 19 nt, Artificial Sequence
  Synthetic
ggugaugaguguuaaggca

SEQ ID NO: 3255 - RNA, 19 nt, Artificial Sequence
  Synthetic
uggauaaugugcuggcuga

SEQ ID NO: 3256 - RNA, 19 nt, Artificial Sequence
  Synthetic
guaccaaccugcagcgacu

SEQ ID NO: 3257 - RNA, 19 nt, Artificial Sequence
  Synthetic
augccaauuaccuggauaa

SEQ ID NO: 3258 - RNA, 19 nt, Artificial Sequence
  Synthetic
agguaaaaccccagaggaa

SEQ ID NO: 3259 - RNA, 19 nt, Artificial Sequence
  Synthetic
ccccagaggaagugcuaaa

SEQ ID NO: 3260 - RNA, 19 nt, Artificial Sequence
  Synthetic
cgagaaagggagaaaaguu

SEQ ID NO: 3261 - RNA, 19 nt, Artificial Sequence
  Synthetic
acgacauggaagugggcau

SEQ ID NO: 3262 - RNA, 19 nt, Artificial Sequence
  Synthetic
acagcgagaaagggagaaa

SEQ ID NO: 3263 - RNA, 19 nt, Artificial Sequence
  Synthetic
acaccaugggccagaucaa

SEQ ID NO: 3264 - RNA, 19 nt, Artificial Sequence
  Synthetic
cggcauucagggaccggaa

SEQ ID NO: 3265 - RNA, 19 nt, Artificial Sequence
  Synthetic
acaagaaauuggagacaaa

SEQ ID NO: 3266 - RNA, 19 nt, Artificial Sequence
  Synthetic
auacagaagcugagaauaa

SEQ ID NO: 3267 - RNA, 19 nt, Artificial Sequence
  Synthetic
gcaagaggauauugacaaa

SEQ ID NO: 3268 - RNA, 19 nt, Artificial Sequence
  Synthetic
uguuugaaguugugagaaa

SEQ ID NO: 3269 - RNA, 19 nt, Artificial Sequence
  Synthetic
aggaagagcaguugaggaa

SEQ ID NO: 3270 - RNA, 19 nt, Artificial Sequence
  Synthetic
ggaaauugaaggaugcuua

SEQ ID NO: 3271 - RNA, 19 nt, Artificial Sequence
  Synthetic
caaaguaacuacagacuau

SEQ ID NO: 3272 - RNA, 19 nt, Artificial Sequence
  Synthetic
ggaugaugcaagaggauau

SEQ ID NO: 3273 - RNA, 19 nt, Artificial Sequence
  Synthetic
cuacagaagaugaagauuu

SEQ ID NO: 3274 - RNA, 19 nt, Artificial Sequence
  Synthetic
ggagaaucccauugagaau

SEQ ID NO: 3275 - RNA, 19 nt, Artificial Sequence
  Synthetic
ccauaaaauuugcuggaaa

SEQ ID NO: 3276 - RNA, 19 nt, Artificial Sequence
  Synthetic
aggaagaggaagaagaaga

SEQ ID NO: 3277 - RNA, 19 nt, Artificial Sequence
  Synthetic
ggagcaaguuauagaaagu

SEQ ID NO: 3278 - RNA, 19 nt, Artificial Sequence
  Synthetic
uugacaaagugaaggagaa

SEQ ID NO: 3279 - RNA, 19 nt, Artificial Sequence
  Synthetic
cagccagaauggugaggaa

SEQ ID NO: 3280 - RNA, 19 nt, Artificial Sequence
  Synthetic
gaucagaggaaggaagaaa

SEQ ID NO: 3281 - RNA, 19 nt, Artificial Sequence
  Synthetic
agagagaaguugcagcuaa

SEQ ID NO: 3282 - RNA, 19 nt, Artificial Sequence
  Synthetic
uccaggaaguuaagaguaa

SEQ ID NO: 3283 - RNA, 19 nt, Artificial Sequence
  Synthetic
gaaggaagaaacugagaau

SEQ ID NO: 3284 - RNA, 19 nt, Artificial Sequence
  Synthetic
gaaggaugcuuauggaaaa

SEQ ID NO: 3285 - RNA, 19 nt, Artificial Sequence
  Synthetic
cagaaaucauacagaggau

SEQ ID NO: 3286 - RNA, 19 nt, Artificial Sequence
  Synthetic
ccaaagaagcggagaaaga

SEQ ID NO: 3287 - RNA, 19 nt, Artificial Sequence
  Synthetic
ccagggagcugcagggaaa

SEQ ID NO: 3288 - RNA, 19 nt, Artificial Sequence
  Synthetic
ucaagaagcuacaggaaaa

SEQ ID NO: 3289 - RNA, 19 nt, Artificial Sequence
  Synthetic
caacauagagucugagauu

SEQ ID NO: 3290 - RNA, 19 nt, Artificial Sequence
  Synthetic
cacaagaggaagaagaaua

SEQ ID NO: 3291 - RNA, 19 nt, Artificial Sequence
  Synthetic
agacaggcccagagguuua

SEQ ID NO: 3292 - RNA, 19 nt, Artificial Sequence
  Synthetic
agggaaagcaacagcuaua

SEQ ID NO: 3293 - RNA, 19 nt, Artificial Sequence
  Synthetic
gggacagagagguggacaa

SEQ ID NO: 3294 - RNA, 19 nt, Artificial Sequence
  Synthetic
guugaaaguuacauggauu

SEQ ID NO: 3295 - RNA, 19 nt, Artificial Sequence
  Synthetic
guuguagaguugaaaguua

SEQ ID NO: 3296 - RNA, 19 nt, Artificial Sequence
  Synthetic
acaagaggaagaagaauaa

SEQ ID NO: 3297 - RNA, 19 nt, Artificial Sequence
  Synthetic
gagacuucgugguagauaa

SEQ ID NO: 3298 - RNA, 19 nt, Artificial Sequence
  Synthetic
gcugauuggagaagaggaa

SEQ ID NO: 3299 - RNA, 19 nt, Artificial Sequence
  Synthetic
acauagagucugagauuga

SEQ ID NO: 3300 - RNA, 19 nt, Artificial Sequence
  Synthetic
ucaagaagacccuggacaa

SEQ ID NO: 3301 - RNA, 19 nt, Artificial Sequence
  Synthetic
gcaucauggucaagacuuu

SEQ ID NO: 3302 - RNA, 19 nt, Artificial Sequence
  Synthetic
ucaagaacuuaaagcgcaa

SEQ ID NO: 3303 - RNA, 19 nt, Artificial Sequence
  Synthetic
ccauuguagaggaggagaa

SEQ ID NO: 3304 - RNA, 19 nt, Artificial Sequence
  Synthetic
uggaagacccagacaagaa

SEQ ID NO: 3305 - RNA, 19 nt, Artificial Sequence
  Synthetic
ggcaagagcagcugcacaa

SEQ ID NO: 3306 - RNA, 19 nt, Artificial Sequence
  Synthetic
uggaagaggugcagguugu

SEQ ID NO: 3307 - RNA, 19 nt, Artificial Sequence
  Synthetic
cggagugcacagaggacaa

SEQ ID NO: 3308 - RNA, 19 nt, Artificial Sequence
  Synthetic
gcaaggaccugcagcacau

SEQ ID NO: 3309 - RNA, 19 nt, Artificial Sequence
  Synthetic
aaaccaaagaagcggagaa

SEQ ID NO: 3310 - RNA, 19 nt, Artificial Sequence
  Synthetic
gcacggugaucgacgucaa

SEQ ID NO: 3311 - RNA, 19 nt, Artificial Sequence
  Synthetic
ccaacaagaaccugaggau

SEQ ID NO: 3312 - RNA, 19 nt, Artificial Sequence
  Synthetic
ccucaggccuguugaacuu

SEQ ID NO: 3313 - RNA, 19 nt, Artificial Sequence
  Synthetic
cgcaaacacaagaggaaga

SEQ ID NO: 3314 - RNA, 19 nt, Artificial Sequence
  Synthetic
caucaagaagcuacaggaa

SEQ ID NO: 3315 - RNA, 19 nt, Artificial Sequence
  Synthetic
gaggaagaugugaguguuu

SEQ ID NO: 3316 - RNA, 19 nt, Artificial Sequence
  Synthetic
ccuccaacucugucucuaa

SEQ ID NO: 3317 - RNA, 19 nt, Artificial Sequence
  Synthetic
ggcacugggaccuggauuu

SEQ ID NO: 3318 - RNA, 19 nt, Artificial Sequence
  Synthetic
acaaggaggugacgacacu

SEQ ID NO: 3319 - RNA, 19 nt, Artificial Sequence
  Synthetic
ggagaacuacgaggaguau

SEQ ID NO: 3320 - RNA, 19 nt, Artificial Sequence
  Synthetic
ucaagugccugcugaucca

SEQ ID NO: 3321 - RNA, 19 nt, Artificial Sequence
  Synthetic
gacacguacugcugaccau

SEQ ID NO: 3322 - RNA, 19 nt, Artificial Sequence
  Synthetic
ccgcagccaugaacuccaa

SEQ ID NO: 3323 - RNA, 19 nt, Artificial Sequence
  Synthetic
gcuacuuccugaccaagau

SEQ ID NO: 3324 - RNA, 19 nt, Artificial Sequence
  Synthetic
ggaggucuguuccgcauga

SEQ ID NO: 3325 - RNA, 19 nt, Artificial Sequence
  Synthetic
acugggaccuggauuuguu

SEQ ID NO: 3326 - RNA, 19 nt, Artificial Sequence
  Synthetic
ucaaggucuuucccaacga

SEQ ID NO: 3327 - RNA, 19 nt, Artificial Sequence
  Synthetic
gcacugggaccuggauuug

SEQ ID NO: 3328 - RNA, 19 nt, Artificial Sequence
  Synthetic
guacugcugaccaucaagu

SEQ ID NO: 3329 - RNA, 19 nt, Artificial Sequence
  Synthetic
agacagagcuugagaauaa

SEQ ID NO: 3330 - RNA, 19 nt, Artificial Sequence
  Synthetic
ggagaaacauaaugaagaa

SEQ ID NO: 3331 - RNA, 19 nt, Artificial Sequence
  Synthetic
gugaaaaguugauggauaa

SEQ ID NO: 3332 - RNA, 19 nt, Artificial Sequence
  Synthetic
gcauaaaggagauaacaaa

SEQ ID NO: 3333 - RNA, 19 nt, Artificial Sequence
  Synthetic
aaucagaccuugacagaaa

SEQ ID NO: 3334 - RNA, 19 nt, Artificial Sequence
  Synthetic
gggugaaauugcaguauua

SEQ ID NO: 3335 - RNA, 19 nt, Artificial Sequence
  Synthetic
gcaaagaauuaaagcauca

SEQ ID NO: 3336 - RNA, 19 nt, Artificial Sequence
  Synthetic
gugaagaaucagucagaaa

SEQ ID NO: 3337 - RNA, 19 nt, Artificial Sequence
  Synthetic
augaagaaucugugaguaa

SEQ ID NO: 3338 - RNA, 19 nt, Artificial Sequence
  Synthetic
ccgaagagcuagaagguca

SEQ ID NO: 3339 - RNA, 19 nt, Artificial Sequence
  Synthetic
uaauagaggucuuggacua

SEQ ID NO: 3340 - RNA, 19 nt, Artificial Sequence
  Synthetic
acucaaagaugaaucgaaa

SEQ ID NO: 3341 - RNA, 19 nt, Artificial Sequence
  Synthetic
gagaagaucuuuaugcaaa

SEQ ID NO: 3342 - RNA, 19 nt, Artificial Sequence
  Synthetic
ggaacuugcagcagagaaa

SEQ ID NO: 3343 - RNA, 19 nt, Artificial Sequence
  Synthetic
cuguauggccugugggaaa

SEQ ID NO: 3344 - RNA, 19 nt, Artificial Sequence
  Synthetic
aagcaacgguucagaauaa

SEQ ID NO: 3345 - RNA, 19 nt, Artificial Sequence
  Synthetic
gaagagcaguugaaggaaa

SEQ ID NO: 3346 - RNA, 19 nt, Artificial Sequence
  Synthetic
uaucacaacuucagaguaa

SEQ ID NO: 3347 - RNA, 19 nt, Artificial Sequence
  Synthetic
cugcaaaguuacaagacaa

SEQ ID NO: 3348 - RNA, 19 nt, Artificial Sequence
  Synthetic
aaacaaagauucagcauga

SEQ ID NO: 3349 - RNA, 19 nt, Artificial Sequence
  Synthetic
cggaagaauuaaagaagga

SEQ ID NO: 3350 - RNA, 19 nt, Artificial Sequence
  Synthetic
uggcagagauagaagaaau

SEQ ID NO: 3351 - RNA, 19 nt, Artificial Sequence
  Synthetic
gcgcaggucuggagaguca

SEQ ID NO: 3352 - RNA, 19 nt, Artificial Sequence
  Synthetic
ggaacauaaaugagcuaaa

SEQ ID NO: 3353 - RNA, 19 nt, Artificial Sequence
  Synthetic
guucaaacacuaauggaua

SEQ ID NO: 3354 - RNA, 19 nt, Artificial Sequence
  Synthetic
uaaaggagaaggugaaaua

SEQ ID NO: 3355 - RNA, 19 nt, Artificial Sequence
  Synthetic
ucgagaagcugcugaacaa

SEQ ID NO: 3356 - RNA, 19 nt, Artificial Sequence
  Synthetic
cagcaaagcaccacggcaa

SEQ ID NO: 3357 - RNA, 19 nt, Artificial Sequence
  Synthetic
gcaacagcaucaagaacaa

SEQ ID NO: 3358 - RNA, 19 nt, Artificial Sequence
  Synthetic
ccacaaacuagaaagcaua

SEQ ID NO: 3359 - RNA, 19 nt, Artificial Sequence
  Synthetic
gcucagaagagguggcuuu

SEQ ID NO: 3360 - RNA, 19 nt, Artificial Sequence
  Synthetic
acacaugagcccuggauga

SEQ ID NO: 3361 - RNA, 19 nt, Artificial Sequence
  Synthetic
aaacaacugcugucagaaa

SEQ ID NO: 3362 - RNA, 19 nt, Artificial Sequence
  Synthetic
aguggaagguggaggaucu

SEQ ID NO: 3363 - RNA, 19 nt, Artificial Sequence
  Synthetic
guaaacaacugcugucaga

SEQ ID NO: 3364 - RNA, 19 nt, Artificial Sequence
  Synthetic
gagaccagaggaaggaauu

SEQ ID NO: 3365 - RNA, 19 nt, Artificial Sequence
  Synthetic
caagacaacuggcaagcuu

SEQ ID NO: 3366 - RNA, 19 nt, Artificial Sequence
  Synthetic
gcugaacccugacugguaa

SEQ ID NO: 3367 - RNA, 19 nt, Artificial Sequence
  Synthetic
ccucuuguccugcuggaaa

SEQ ID NO: 3368 - RNA, 19 nt, Artificial Sequence
  Synthetic
cuggaaagauagcaguguu

SEQ ID NO: 3369 - RNA, 19 nt, Artificial Sequence
  Synthetic
gcagggaggugaccaugua

SEQ ID NO: 3370 - RNA, 19 nt, Artificial Sequence
  Synthetic
ucaacgagcugcccgagaa

SEQ ID NO: 3371 - RNA, 19 nt, Artificial Sequence
  Synthetic
caugagcccuggaugagua

SEQ ID NO: 3372 - RNA, 19 nt, Artificial Sequence
  Synthetic
agacggagcaccugagaug

SEQ ID NO: 3373 - RNA, 19 nt, Artificial Sequence
  Synthetic
ggacugagggaauccugua

SEQ ID NO: 3374 - RNA, 19 nt, Artificial Sequence
  Synthetic
gcagggacaggcaagacaa

SEQ ID NO: 3375 - RNA, 19 nt, Artificial Sequence
  Synthetic
aacccugacugguaaacaa

SEQ ID NO: 3376 - RNA, 19 nt, Artificial Sequence
  Synthetic
ccauguaacucugaccaau

SEQ ID NO: 3377 - RNA, 19 nt, Artificial Sequence
  Synthetic
ugugggaggugcagcaugu

SEQ ID NO: 3378 - RNA, 19 nt, Artificial Sequence
  Synthetic
aaaggugugcccagucuaa

SEQ ID NO: 3379 - RNA, 19 nt, Artificial Sequence
  Synthetic
ccagaggacugagggaauc

SEQ ID NO: 3380 - RNA, 19 nt, Artificial Sequence
  Synthetic
ccagauugcggguccaagu

SEQ ID NO: 3381 - RNA, 19 nt, Artificial Sequence
  Synthetic
gaaagauagcaguguucuc

SEQ ID NO: 3382 - RNA, 19 nt, Artificial Sequence
  Synthetic
cugaaauguuuacgguuua

SEQ ID NO: 3383 - RNA, 19 nt, Artificial Sequence
  Synthetic
ggaagaagcacuauauuca

SEQ ID NO: 3384 - RNA, 19 nt, Artificial Sequence
  Synthetic
caggacagaacuaggcuaa

SEQ ID NO: 3385 - RNA, 19 nt, Artificial Sequence
  Synthetic
cgguuuaacugguacauca

SEQ ID NO: 3386 - RNA, 19 nt, Artificial Sequence
  Synthetic
aaacacagauggucccaaa

SEQ ID NO: 3387 - RNA, 19 nt, Artificial Sequence
  Synthetic
ccggguauuugaagaaaga

SEQ ID NO: 3388 - RNA, 19 nt, Artificial Sequence
  Synthetic
caacagauaucauucguuu

SEQ ID NO: 3389 - RNA, 19 nt, Artificial Sequence
  Synthetic
agaaaugacaagaugcuuu

SEQ ID NO: 3390 - RNA, 19 nt, Artificial Sequence
  Synthetic
gcaauucuccagaggaaaa

SEQ ID NO: 3391 - RNA, 19 nt, Artificial Sequence
  Synthetic
ggaucuggaagaagcacua

SEQ ID NO: 3392 - RNA, 19 nt, Artificial Sequence
  Synthetic
gagccaaaguggacugaac

SEQ ID NO: 3393 - RNA, 19 nt, Artificial Sequence
  Synthetic
ggacagacucucaaagaag

SEQ ID NO: 3394 - RNA, 19 nt, Artificial Sequence
  Synthetic
ucaacuaguuacaagcaau

SEQ ID NO: 3395 - RNA, 19 nt, Artificial Sequence
  Synthetic
gaagagggagacaagcuaa

SEQ ID NO: 3396 - RNA, 19 nt, Artificial Sequence
  Synthetic
uggacagacucucaaagaa

SEQ ID NO: 3397 - RNA, 19 nt, Artificial Sequence
  Synthetic
ggaugugaauggaggcgau

SEQ ID NO: 3398 - RNA, 19 nt, Artificial Sequence
  Synthetic
ccucgugacccucuggaaa

SEQ ID NO: 3399 - RNA, 19 nt, Artificial Sequence
  Synthetic
cggcgaccauccagcagaa

SEQ ID NO: 3400 - RNA, 19 nt, Artificial Sequence
  Synthetic
ucuggagccuggaugugaa

SEQ ID NO: 3401 - RNA, 19 nt, Artificial Sequence
  Synthetic
gagagggcuucaucacuga

SEQ ID NO: 3402 - RNA, 19 nt, Artificial Sequence
  Synthetic
gcgaccauccagcagaaga

SEQ ID NO: 3403 - RNA, 19 nt, Artificial Sequence
  Synthetic
cagauugcggguccaagua

SEQ ID NO: 3404 - RNA, 19 nt, Artificial Sequence
  Synthetic
uggaagaggaggaaggcaa

SEQ ID NO: 3405 - RNA, 19 nt, Artificial Sequence
  Synthetic
aggaagacacgguggaaga

SEQ ID NO: 3406 - RNA, 19 nt, Artificial Sequence
  Synthetic
gcuucagccuggaggagaa

SEQ ID NO: 3407 - RNA, 19 nt, Artificial Sequence
  Synthetic
agucagaggguguggucaa

SEQ ID NO: 3408 - RNA, 19 nt, Artificial Sequence
  Synthetic
gaggagaagaagaagguga

SEQ ID NO: 3409 - RNA, 19 nt, Artificial Sequence
  Synthetic
aggagaagaagaaggugaa

SEQ ID NO: 3410 - RNA, 19 nt, Artificial Sequence
  Synthetic
ucuaaugagucggaggaaa

SEQ ID NO: 3411 - RNA, 19 nt, Artificial Sequence
  Synthetic
augaguacguacagagaga

SEQ ID NO: 3412 - RNA, 19 nt, Artificial Sequence
  Synthetic
caggaauaccagagggagu

SEQ ID NO: 3413 - RNA, 19 nt, Artificial Sequence
  Synthetic
cuucaaacgcuguggaaac

SEQ ID NO: 3414 - RNA, 19 nt, Artificial Sequence
  Synthetic
guugaaacuuugaggaaau

SEQ ID NO: 3415 - RNA, 19 nt, Artificial Sequence
  Synthetic
gugcagaaguacugucuaa

SEQ ID NO: 3416 - RNA, 19 nt, Artificial Sequence
  Synthetic
ggaaaauggaagagaguga

SEQ ID NO: 3417 - RNA, 19 nt, Artificial Sequence
  Synthetic
cacaagacuuugagaagaa

SEQ ID NO: 3418 - RNA, 19 nt, Artificial Sequence
  Synthetic
ggaagagagugacgaagaa

SEQ ID NO: 3419 - RNA, 19 nt, Artificial Sequence
  Synthetic
ggaucagaaugaagagaca

SEQ ID NO: 3420 - RNA, 19 nt, Artificial Sequence
  Synthetic
gaacaaucccagcggcaaa

SEQ ID NO: 3421 - RNA, 19 nt, Artificial Sequence
  Synthetic
gcauggauuuggaguuaaa

SEQ ID NO: 3422 - RNA, 19 nt, Artificial Sequence
  Synthetic
gagaagaaacucauggaau

SEQ ID NO: 3423 - RNA, 19 nt, Artificial Sequence
  Synthetic
gguauguguuggagcgcua

SEQ ID NO: 3424 - RNA, 19 nt, Artificial Sequence
  Synthetic
ccacagggauagaagauga

SEQ ID NO: 3425 - RNA, 19 nt, Artificial Sequence
  Synthetic
gacaagagacuuuggacaa

SEQ ID NO: 3426 - RNA, 19 nt, Artificial Sequence
  Synthetic
gguugaaacuuugaggaaa

SEQ ID NO: 3427 - RNA, 19 nt, Artificial Sequence
  Synthetic
cagcauggauuuggaguua

SEQ ID NO: 3428 - RNA, 19 nt, Artificial Sequence
  Synthetic
aggaagaggaggaggagga

SEQ ID NO: 3429 - RNA, 19 nt, Artificial Sequence
  Synthetic
aggaggaggaggaggaaga

SEQ ID NO: 3430 - RNA, 19 nt, Artificial Sequence
  Synthetic
cugaagcccuacagaguua

SEQ ID NO: 3431 - RNA, 19 nt, Artificial Sequence
  Synthetic
ggacgugaacacacagaaa

SEQ ID NO: 3432 - RNA, 19 nt, Artificial Sequence
  Synthetic
ggcaagagcuuauaaauga

SEQ ID NO: 3433 - RNA, 19 nt, Artificial Sequence
  Synthetic
gcagagacaugaagaaguu

SEQ ID NO: 3434 - RNA, 19 nt, Artificial Sequence
  Synthetic
gggaauguccaaagugcua

SEQ ID NO: 3435 - RNA, 19 nt, Artificial Sequence
  Synthetic
agaggaggagcgagagaaa

SEQ ID NO: 3436 - RNA, 19 nt, Artificial Sequence
  Synthetic
ggacacggguuccaaauaa

SEQ ID NO: 3437 - RNA, 19 nt, Artificial Sequence
  Synthetic
guggagagguggaucagaa

SEQ ID NO: 3438 - RNA, 19 nt, Artificial Sequence
  Synthetic
ccaaguggauucugagaca

SEQ ID NO: 3439 - RNA, 19 nt, Artificial Sequence
  Synthetic
cuaugaagaugauggcauu

SEQ ID NO: 3440 - RNA, 19 nt, Artificial Sequence
  Synthetic
guaaauuggucagcagaaa

SEQ ID NO: 3441 - RNA, 19 nt, Artificial Sequence
  Synthetic
cgacaagagacuuuggaca

SEQ ID NO: 3442 - RNA, 19 nt, Artificial Sequence
  Synthetic
ggggagaggaggaggaaga

SEQ ID NO: 3443 - RNA, 19 nt, Artificial Sequence
  Synthetic
ggaaaggucuucuggcuca

SEQ ID NO: 3444 - RNA, 19 nt, Artificial Sequence
  Synthetic
caagagacgcggagagaua

SEQ ID NO: 3445 - RNA, 19 nt, Artificial Sequence
  Synthetic
cggagaagauccuguguaa

SEQ ID NO: 3446 - RNA, 19 nt, Artificial Sequence
  Synthetic
ggaagaggcugguggacga

SEQ ID NO: 3447 - RNA, 19 nt, Artificial Sequence
  Synthetic
uggcugugcuggagggaau

SEQ ID NO: 3448 - RNA, 19 nt, Artificial Sequence
  Synthetic
gauaaucagacuugaggaa

SEQ ID NO: 3449 - RNA, 19 nt, Artificial Sequence
  Synthetic
gaacaggacggaugaagaa

SEQ ID NO: 3450 - RNA, 19 nt, Artificial Sequence
  Synthetic
ggaacaggacggaugaaga

SEQ ID NO: 3451 - RNA, 19 nt, Artificial Sequence
  Synthetic
uugcaaagccuuacucuaa

SEQ ID NO: 3452 - RNA, 19 nt, Artificial Sequence
  Synthetic
gcgagaggaaggucaaauu

SEQ ID NO: 3453 - RNA, 19 nt, Artificial Sequence
  Synthetic
ccacaagccuauacaccau

SEQ ID NO: 3454 - RNA, 19 nt, Artificial Sequence
  Synthetic
ccuugaagagggcagauaa

SEQ ID NO: 3455 - RNA, 19 nt, Artificial Sequence
  Synthetic
ggaaauaaggaugaucaua

SEQ ID NO: 3456 - RNA, 19 nt, Artificial Sequence
  Synthetic
cuucgaagguacauggcau

SEQ ID NO: 3457 - RNA, 19 nt, Artificial Sequence
  Synthetic
ccuuaugaguacccaagaa

SEQ ID NO: 3458 - RNA, 19 nt, Artificial Sequence
  Synthetic
uaaucagacuugaggaaac

SEQ ID NO: 3459 - RNA, 19 nt, Artificial Sequence
  Synthetic
ugaagagggcagauaauca

SEQ ID NO: 3460 - RNA, 19 nt, Artificial Sequence
  Synthetic
gucaggaggcggagaagau

SEQ ID NO: 3461 - RNA, 19 nt, Artificial Sequence
  Synthetic
gaaauaaggaugaucauag

SEQ ID NO: 3462 - RNA, 19 nt, Artificial Sequence
  Synthetic
ucuauggacugguggaugu

SEQ ID NO: 3463 - RNA, 19 nt, Artificial Sequence
  Synthetic
gaccuaaagucauguggca

SEQ ID NO: 3464 - RNA, 19 nt, Artificial Sequence
  Synthetic
gaugcagacucgcgauuca

SEQ ID NO: 3465 - RNA, 19 nt, Artificial Sequence
  Synthetic
ccucacgguuacauugcaa

SEQ ID NO: 3466 - RNA, 19 nt, Artificial Sequence
  Synthetic
cuagggaccuccagaccau

SEQ ID NO: 3467 - RNA, 19 nt, Artificial Sequence
  Synthetic
gcgggaucauggcgacuuu

SEQ ID NO: 3468 - RNA, 19 nt, Artificial Sequence
  Synthetic
auaaggaugaucauagcua

SEQ ID NO: 3469 - RNA, 19 nt, Artificial Sequence
  Synthetic
gcggagaagauccugugua

SEQ ID NO: 3470 - RNA, 19 nt, Artificial Sequence
  Synthetic
cauagcuaccucacgguua

SEQ ID NO: 3471 - RNA, 19 nt, Artificial Sequence
  Synthetic
gggcagauaaucagacuug

SEQ ID NO: 3472 - RNA, 19 nt, Artificial Sequence
  Synthetic
cgagaggaaggucaaauuu

SEQ ID NO: 3473 - RNA, 19 nt, Artificial Sequence
  Synthetic
ucauggucgucuucaggaa

SEQ ID NO: 3474 - RNA, 19 nt, Artificial Sequence
  Synthetic
ccugcaagcaugaggauaa

SEQ ID NO: 3475 - RNA, 19 nt, Artificial Sequence
  Synthetic
auggaagaccagaaagaaa

SEQ ID NO: 3476 - RNA, 19 nt, Artificial Sequence
  Synthetic
cuaacaaaauggcggaaua

SEQ ID NO: 3477 - RNA, 19 nt, Artificial Sequence
  Synthetic
guggaaugcuauugauuuu

SEQ ID NO: 3478 - RNA, 19 nt, Artificial Sequence
  Synthetic
gcuuguaaacucagaaaga

SEQ ID NO: 3479 - RNA, 19 nt, Artificial Sequence
  Synthetic
caugaggauaagagagcua

SEQ ID NO: 3480 - RNA, 19 nt, Artificial Sequence
  Synthetic
agaaagaagaugagcugau

SEQ ID NO: 3481 - RNA, 19 nt, Artificial Sequence
  Synthetic
ugauaugggacuaaagcaa

SEQ ID NO: 3482 - RNA, 19 nt, Artificial Sequence
  Synthetic
gaaggaaauaaaaggguua

SEQ ID NO: 3483 - RNA, 19 nt, Artificial Sequence
  Synthetic
ugugauaauauguggucaa

SEQ ID NO: 3484 - RNA, 19 nt, Artificial Sequence
  Synthetic
cagaugaaucaaugagaca

SEQ ID NO: 3485 - RNA, 19 nt, Artificial Sequence
  Synthetic
gcuacgugauccagggcau

SEQ ID NO: 3486 - RNA, 19 nt, Artificial Sequence
  Synthetic
gggaagcuccagaagguga

SEQ ID NO: 3487 - RNA, 19 nt, Artificial Sequence
  Synthetic
uggccaugaucuucggcua

SEQ ID NO: 3488 - RNA, 19 nt, Artificial Sequence
  Synthetic
gcauagaccuguacggcug

SEQ ID NO: 3489 - RNA, 19 nt, Artificial Sequence
  Synthetic
uggccaacaucgagagccu

SEQ ID NO: 3490 - RNA, 19 nt, Artificial Sequence
  Synthetic
ccagaagcucacagaucuu

SEQ ID NO: 3491 - RNA, 19 nt, Artificial Sequence
  Synthetic
cagaugacggacagugaga

SEQ ID NO: 3492 - RNA, 19 nt, Artificial Sequence
  Synthetic
gcacagaacugccgaaaca

SEQ ID NO: 3493 - RNA, 19 nt, Artificial Sequence
  Synthetic
gcacacaguuagaagauga

SEQ ID NO: 3494 - RNA, 19 nt, Artificial Sequence
  Synthetic
ggaaaggcauuuacaggua

SEQ ID NO: 3495 - RNA, 19 nt, Artificial Sequence
  Synthetic
gcacagauuuccaaggcuu

SEQ ID NO: 3496 - RNA, 19 nt, Artificial Sequence
  Synthetic
gauggaagcaacuggcaaa

SEQ ID NO: 3497 - RNA, 19 nt, Artificial Sequence
  Synthetic
ucauaaugccugauaguuu

SEQ ID NO: 3498 - RNA, 19 nt, Artificial Sequence
  Synthetic
ggaagcaacuggcaaagaa

SEQ ID NO: 3499 - RNA, 19 nt, Artificial Sequence
  Synthetic
ccuuuauucugcugugaaa

SEQ ID NO: 3500 - RNA, 19 nt, Artificial Sequence
  Synthetic
ggguacuggaguuggacaa

SEQ ID NO: 3501 - RNA, 19 nt, Artificial Sequence
  Synthetic
augaauggaugcauguaaa

SEQ ID NO: 3502 - RNA, 19 nt, Artificial Sequence
  Synthetic
aaacaaugaugaaggccuu

SEQ ID NO: 3503 - RNA, 19 nt, Artificial Sequence
  Synthetic
uguuauagccuuagcagau

SEQ ID NO: 3504 - RNA, 19 nt, Artificial Sequence
  Synthetic
caaagugacuguacugcaa

SEQ ID NO: 3505 - RNA, 19 nt, Artificial Sequence
  Synthetic
gcuaggaccaugccagaaa

SEQ ID NO: 3506 - RNA, 19 nt, Artificial Sequence
  Synthetic
gaagaaugcauccugauaa

SEQ ID NO: 3507 - RNA, 19 nt, Artificial Sequence
  Synthetic
ugacuguacugcaaauuaa

SEQ ID NO: 3508 - RNA, 19 nt, Artificial Sequence
  Synthetic
aagaugaagcucugaaaca

SEQ ID NO: 3509 - RNA, 19 nt, Artificial Sequence
  Synthetic
gccacgaauuggagaagau

SEQ ID NO: 3510 - RNA, 19 nt, Artificial Sequence
  Synthetic
uagcacaaacugagcagaa

SEQ ID NO: 3511 - RNA, 19 nt, Artificial Sequence
  Synthetic
gaaaauaucucgaagcgau

SEQ ID NO: 3512 - RNA, 19 nt, Artificial Sequence
  Synthetic
gccgaaacauugaacauuu

SEQ ID NO: 3513 - RNA, 19 nt, Artificial Sequence
  Synthetic
ggauggaagcaacuggcaa

SEQ ID NO: 3514 - RNA, 19 nt, Artificial Sequence
  Synthetic
uauagagacuuauguggaa

SEQ ID NO: 3515 - RNA, 19 nt, Artificial Sequence
  Synthetic
acugacagcacguguuaua

SEQ ID NO: 3516 - RNA, 19 nt, Artificial Sequence
  Synthetic
ggcaggaaguggacagcga

SEQ ID NO: 3517 - RNA, 19 nt, Artificial Sequence
  Synthetic
aguagaagcucugguguau

SEQ ID NO: 3518 - RNA, 19 nt, Artificial Sequence
  Synthetic
cauaaugccugauaguuuu

SEQ ID NO: 3519 - RNA, 19 nt, Artificial Sequence
  Synthetic
gugcaggcaucaagcggau

SEQ ID NO: 3520 - RNA, 19 nt, Artificial Sequence
  Synthetic
gaugaaggccuuauuaaca

SEQ ID NO: 3521 - RNA, 19 nt, Artificial Sequence
  Synthetic
agaagaugaagcucugaaa

SEQ ID NO: 3522 - RNA, 19 nt, Artificial Sequence
  Synthetic
agaaggaacugcagagaaa

SEQ ID NO: 3523 - RNA, 19 nt, Artificial Sequence
  Synthetic
cgaccaagcuuuauggauu

SEQ ID NO: 3524 - RNA, 19 nt, Artificial Sequence
  Synthetic
gaugaaacgaggaggaaga

SEQ ID NO: 3525 - RNA, 19 nt, Artificial Sequence
  Synthetic
ucaaaguacuaguggccaa

SEQ ID NO: 3526 - RNA, 19 nt, Artificial Sequence
  Synthetic
gacaauaaauggaacagaa

SEQ ID NO: 3527 - RNA, 19 nt, Artificial Sequence
  Synthetic
guggagauguuuugaauuu

SEQ ID NO: 3528 - RNA, 19 nt, Artificial Sequence
  Synthetic
gagccaagaucaaauuaaa

SEQ ID NO: 3529 - RNA, 19 nt, Artificial Sequence
  Synthetic
ggacauuauucuccaagua

SEQ ID NO: 3530 - RNA, 19 nt, Artificial Sequence
  Synthetic
ugauguagucagugagaau

SEQ ID NO: 3531 - RNA, 19 nt, Artificial Sequence
  Synthetic
gccacuugaugaagaguua

SEQ ID NO: 3532 - RNA, 19 nt, Artificial Sequence
  Synthetic
aaacgaggaggaagagaua

SEQ ID NO: 3533 - RNA, 19 nt, Artificial Sequence
  Synthetic
ccguaauucaucagaagaa

SEQ ID NO: 3534 - RNA, 19 nt, Artificial Sequence
  Synthetic
gauuagaacauuugcgcau

SEQ ID NO: 3535 - RNA, 19 nt, Artificial Sequence
  Synthetic
uccaagaaacugaggacua

SEQ ID NO: 3536 - RNA, 19 nt, Artificial Sequence
  Synthetic
caacagugguauuauagaa

SEQ ID NO: 3537 - RNA, 19 nt, Artificial Sequence
  Synthetic
ggacugagaaggaaagcuu

SEQ ID NO: 3538 - RNA, 19 nt, Artificial Sequence
  Synthetic
caucagacauucacccaaa

SEQ ID NO: 3539 - RNA, 19 nt, Artificial Sequence
  Synthetic
gcauugauguagucaguga

SEQ ID NO: 3540 - RNA, 19 nt, Artificial Sequence
  Synthetic
aguacuaauuccugaccaa

SEQ ID NO: 3541 - RNA, 19 nt, Artificial Sequence
  Synthetic
gaagagauagugaccguaa

SEQ ID NO: 3542 - RNA, 19 nt, Artificial Sequence
  Synthetic
ucacaacagugguauuaua

SEQ ID NO: 3543 - RNA, 19 nt, Artificial Sequence
  Synthetic
ugacaguuguguucguaaa

SEQ ID NO: 3544 - RNA, 19 nt, Artificial Sequence
  Synthetic
gagaacuagcccugaacua

SEQ ID NO: 3545 - RNA, 19 nt, Artificial Sequence
  Synthetic
cagagaaauccaagaaacu

SEQ ID NO: 3546 - RNA, 19 nt, Artificial Sequence
  Synthetic
gcagagaaauccaagaaac

SEQ ID NO: 3547 - RNA, 19 nt, Artificial Sequence
  Synthetic
gaaacgaggaggaagagau

SEQ ID NO: 3548 - RNA, 19 nt, Artificial Sequence
  Synthetic
ggacagacacacuuccaua

SEQ ID NO: 3549 - RNA, 19 nt, Artificial Sequence
  Synthetic
ugagaauccuggacagaca

SEQ ID NO: 3550 - RNA, 19 nt, Artificial Sequence
  Synthetic
aaucagaacacuuagaaga

SEQ ID NO: 3551 - RNA, 19 nt, Artificial Sequence
  Synthetic
cauuauggaagaaguacua

SEQ ID NO: 3552 - RNA, 19 nt, Artificial Sequence
  Synthetic
ggagaaaguuugaauuuga

SEQ ID NO: 3553 - RNA, 19 nt, Artificial Sequence
  Synthetic
gaauugauguugugaguga

SEQ ID NO: 3554 - RNA, 19 nt, Artificial Sequence
  Synthetic
gagaacuggcguugaauua

SEQ ID NO: 3555 - RNA, 19 nt, Artificial Sequence
  Synthetic
caguuuaucuguugagaau

SEQ ID NO: 3556 - RNA, 19 nt, Artificial Sequence
  Synthetic
ggauuauagccuagaugaa

SEQ ID NO: 3557 - RNA, 19 nt, Artificial Sequence
  Synthetic
acacugaagucuccaaaua

SEQ ID NO: 3558 - RNA, 19 nt, Artificial Sequence
  Synthetic
aaacauuccccuagaguua

SEQ ID NO: 3559 - RNA, 19 nt, Artificial Sequence
  Synthetic
uguaagacugugugagaga

SEQ ID NO: 3560 - RNA, 19 nt, Artificial Sequence
  Synthetic
cuuucuauaugaagaggaa

SEQ ID NO: 3561 - RNA, 19 nt, Artificial Sequence
  Synthetic
gcuuuaagguugacaguag

SEQ ID NO: 3562 - RNA, 19 nt, Artificial Sequence
  Synthetic
ccuugaacaucuucgaauu

SEQ ID NO: 3563 - RNA, 19 nt, Artificial Sequence
  Synthetic
agaagcugccugugauaua

SEQ ID NO: 3564 - RNA, 19 nt, Artificial Sequence
  Synthetic
gaaugaagaggaacaguuu

SEQ ID NO: 3565 - RNA, 19 nt, Artificial Sequence
  Synthetic
gauuauagccuagaugaaa

SEQ ID NO: 3566 - RNA, 19 nt, Artificial Sequence
  Synthetic
ugucaaggccuuagagaac

SEQ ID NO: 3567 - RNA, 19 nt, Artificial Sequence
  Synthetic
aagaggaauucgagacguu

SEQ ID NO: 3568 - RNA, 19 nt, Artificial Sequence
  Synthetic
cugugugagagaagguuaa

SEQ ID NO: 3569 - RNA, 19 nt, Artificial Sequence
  Synthetic
ccaaauaccugggaagagu

SEQ ID NO: 3570 - RNA, 19 nt, Artificial Sequence
  Synthetic
gagcagcgaaacagccaaa

SEQ ID NO: 3571 - RNA, 19 nt, Artificial Sequence
  Synthetic
ucgaauugauguugugagu

SEQ ID NO: 3572 - RNA, 19 nt, Artificial Sequence
  Synthetic
caacuguccucgacugauu

SEQ ID NO: 3573 - RNA, 19 nt, Artificial Sequence
  Synthetic
uuagagaacuggcguugaa

SEQ ID NO: 3574 - RNA, 19 nt, Artificial Sequence
  Synthetic
guacaaaccuaacagccuu

SEQ ID NO: 3575 - RNA, 19 nt, Artificial Sequence
  Synthetic
guauguaggagguggaaug

SEQ ID NO: 3576 - RNA, 19 nt, Artificial Sequence
  Synthetic
ugugaugccucucugguaa

SEQ ID NO: 3577 - RNA, 19 nt, Artificial Sequence
  Synthetic
gaacuggcguugaauuauu

SEQ ID NO: 3578 - RNA, 19 nt, Artificial Sequence
  Synthetic
gaguuaguggugugugcua

SEQ ID NO: 3579 - RNA, 19 nt, Artificial Sequence
  Synthetic
gggaugcacuuauuaaaca

SEQ ID NO: 3580 - RNA, 19 nt, Artificial Sequence
  Synthetic
aagauacaccaguggauga

SEQ ID NO: 3581 - RNA, 19 nt, Artificial Sequence
  Synthetic
agaaugaagaggaacaguu

SEQ ID NO: 3582 - RNA, 19 nt, Artificial Sequence
  Synthetic
ccaaagaaguaguggauuu

SEQ ID NO: 3583 - RNA, 19 nt, Artificial Sequence
  Synthetic
ggaacuuacuuuugaacaa

SEQ ID NO: 3584 - RNA, 19 nt, Artificial Sequence
  Synthetic
acacagacauugaugaauu

SEQ ID NO: 3585 - RNA, 19 nt, Artificial Sequence
  Synthetic
cuguggagauguaagaaua

SEQ ID NO: 3586 - RNA, 19 nt, Artificial Sequence
  Synthetic
gaacaaaaguagagcaaac

SEQ ID NO: 3587 - RNA, 19 nt, Artificial Sequence
  Synthetic
ugauaggagccaaguguaa

SEQ ID NO: 3588 - RNA, 19 nt, Artificial Sequence
  Synthetic
ggacauauuaggaacaaga

SEQ ID NO: 3589 - RNA, 19 nt, Artificial Sequence
  Synthetic
agagcuaguuggagaauga

SEQ ID NO: 3590 - RNA, 19 nt, Artificial Sequence
  Synthetic
ugugauagcuagcaugaua

SEQ ID NO: 3591 - RNA, 19 nt, Artificial Sequence
  Synthetic
aauaaaguaucguggcauu

SEQ ID NO: 3592 - RNA, 19 nt, Artificial Sequence
  Synthetic
aaaggaacacugagcaaua

SEQ ID NO: 3593 - RNA, 19 nt, Artificial Sequence
  Synthetic
gugauaugcuuuagucaau

SEQ ID NO: 3594 - RNA, 19 nt, Artificial Sequence
  Synthetic
guuucgaacuuaugggaca

SEQ ID NO: 3595 - RNA, 19 nt, Artificial Sequence
  Synthetic
ugucaugauugaagacuau

SEQ ID NO: 3596 - RNA, 19 nt, Artificial Sequence
  Synthetic
ccaguaugccaaagaagua

SEQ ID NO: 3597 - RNA, 19 nt, Artificial Sequence
  Synthetic
ugagaauggaauagcagaa

SEQ ID NO: 3598 - RNA, 19 nt, Artificial Sequence
  Synthetic
gugucaugauugaagacua

SEQ ID NO: 3599 - RNA, 19 nt, Artificial Sequence
  Synthetic
augcagagguaguccagua

SEQ ID NO: 3600 - RNA, 19 nt, Artificial Sequence
  Synthetic
gguuauuucucuggauuaa

SEQ ID NO: 3601 - RNA, 19 nt, Artificial Sequence
  Synthetic
augaacacccauagagcua

SEQ ID NO: 3602 - RNA, 19 nt, Artificial Sequence
  Synthetic
acacugagcaauaaaguau

SEQ ID NO: 3603 - RNA, 19 nt, Artificial Sequence
  Synthetic
ccacaaaucuuauacgacu

SEQ ID NO: 3604 - RNA, 19 nt, Artificial Sequence
  Synthetic
uaaacuaccuuaugagcuu

SEQ ID NO: 3605 - RNA, 19 nt, Artificial Sequence
  Synthetic
auauagaagaugaugccua

SEQ ID NO: 3606 - RNA, 19 nt, Artificial Sequence
  Synthetic
cugcaaccauacugggcaa

SEQ ID NO: 3607 - RNA, 19 nt, Artificial Sequence
  Synthetic
ggaaguaaauaguucucuu

SEQ ID NO: 3608 - RNA, 19 nt, Artificial Sequence
  Synthetic
uuauacgacuggaaguaaa

SEQ ID NO: 3609 - RNA, 19 nt, Artificial Sequence
  Synthetic
ugacacagacauugaugaa

SEQ ID NO: 3610 - RNA, 19 nt, Artificial Sequence
  Synthetic
gguuuguggauccgaauua

SEQ ID NO: 3611 - RNA, 19 nt, Artificial Sequence
  Synthetic
ucaaagaguucaugcaucu

SEQ ID NO: 3612 - RNA, 19 nt, Artificial Sequence
  Synthetic
gggcauuggagaagaaaua

SEQ ID NO: 3613 - RNA, 19 nt, Artificial Sequence
  Synthetic
augaagagcuuaaggauau

SEQ ID NO: 3614 - RNA, 19 nt, Artificial Sequence
  Synthetic
ggaugaagaugcugacauu

SEQ ID NO: 3615 - RNA, 19 nt, Artificial Sequence
  Synthetic
ggaacagcuuuaagaacua

SEQ ID NO: 3616 - RNA, 19 nt, Artificial Sequence
  Synthetic
gggauuaggucuuuucaaa

SEQ ID NO: 3617 - RNA, 19 nt, Artificial Sequence
  Synthetic
ugauacagauacaggcaua

SEQ ID NO: 3618 - RNA, 19 nt, Artificial Sequence
  Synthetic
ccuuagaggucuuagccua

SEQ ID NO: 3619 - RNA, 19 nt, Artificial Sequence
  Synthetic
uaacaagggcauuggagaa

SEQ ID NO: 3620 - RNA, 19 nt, Artificial Sequence
  Synthetic
ggaugaaaagucagauaaa

SEQ ID NO: 3621 - RNA, 19 nt, Artificial Sequence
  Synthetic
gaaucaugcugaagagcga

SEQ ID NO: 3622 - RNA, 19 nt, Artificial Sequence
  Synthetic
uaugaagagcuuaaggaua

SEQ ID NO: 3623 - RNA, 19 nt, Artificial Sequence
  Synthetic
ccacaaucauuugaagaaa

SEQ ID NO: 3624 - RNA, 19 nt, Artificial Sequence
  Synthetic
caacugaacuugauacuga

SEQ ID NO: 3625 - RNA, 19 nt, Artificial Sequence
  Synthetic
uuaaauauuccguggauga

SEQ ID NO: 3626 - RNA, 19 nt, Artificial Sequence
  Synthetic
aagcagaagugucagaaca

SEQ ID NO: 3627 - RNA, 19 nt, Artificial Sequence
  Synthetic
aaagaaagugauugcacaa

SEQ ID NO: 3628 - RNA, 19 nt, Artificial Sequence
  Synthetic
uggaauggagacauagaaa

SEQ ID NO: 3629 - RNA, 19 nt, Artificial Sequence
  Synthetic
augcaugagcagauugaaa

SEQ ID NO: 3630 - RNA, 19 nt, Artificial Sequence
  Synthetic
gaauaggacuacauacuuu

SEQ ID NO: 3631 - RNA, 19 nt, Artificial Sequence
  Synthetic
aagagagauuggaggcuuu

SEQ ID NO: 3632 - RNA, 19 nt, Artificial Sequence
  Synthetic
ugaaagaggaagaggaggu

SEQ ID NO: 3633 - RNA, 19 nt, Artificial Sequence
  Synthetic
ggaauggagacauagaaau

SEQ ID NO: 3634 - RNA, 19 nt, Artificial Sequence
  Synthetic
acuguggaauggagacaua

SEQ ID NO: 3635 - RNA, 19 nt, Artificial Sequence
  Synthetic
gaaaacaucuacaagcaaa

SEQ ID NO: 3636 - RNA, 19 nt, Artificial Sequence
  Synthetic
uaaagaagcagaaguguca

SEQ ID NO: 3637 - RNA, 19 nt, Artificial Sequence
  Synthetic
ucaagagacuggacgugua

SEQ ID NO: 3638 - RNA, 19 nt, Artificial Sequence
  Synthetic
ucagaaggauacugcagaa

SEQ ID NO: 3639 - RNA, 19 nt, Artificial Sequence
  Synthetic
gauguuagaugcugaagau

SEQ ID NO: 3640 - RNA, 19 nt, Artificial Sequence
  Synthetic
uguuagaugcugaagauuu

SEQ ID NO: 3641 - RNA, 19 nt, Artificial Sequence
  Synthetic
gagaagauuuccagagcuc

SEQ ID NO: 3642 - RNA, 19 nt, Artificial Sequence
  Synthetic
gggucaaggcggagaagaa

SEQ ID NO: 3643 - RNA, 19 nt, Artificial Sequence
  Synthetic
acccagaaguggugccaua

SEQ ID NO: 3644 - RNA, 19 nt, Artificial Sequence
  Synthetic
ccugcaacuuugugagcaa

SEQ ID NO: 3645 - RNA, 19 nt, Artificial Sequence
  Synthetic
uggaaauccuggugcagau

SEQ ID NO: 3646 - RNA, 19 nt, Artificial Sequence
  Synthetic
gcaccggcaucaaccguaa

SEQ ID NO: 3647 - RNA, 19 nt, Artificial Sequence
  Synthetic
gugagaaggaccuggagca

SEQ ID NO: 3648 - RNA, 19 nt, Artificial Sequence
  Synthetic
gcaaguuguggcugaccua

SEQ ID NO: 3649 - RNA, 19 nt, Artificial Sequence
  Synthetic
gcuuaugcccaaucgguuu

SEQ ID NO: 3650 - RNA, 19 nt, Artificial Sequence
  Synthetic
uggaguggcuuaugcccaa

SEQ ID NO: 3651 - RNA, 19 nt, Artificial Sequence
  Synthetic
ugucgaggcucugcagaaa

SEQ ID NO: 3652 - RNA, 19 nt, Artificial Sequence
  Synthetic
caucaaccguaauagcauu

SEQ ID NO: 3653 - RNA, 19 nt, Artificial Sequence
  Synthetic
gcaucaaccguaauagcau

SEQ ID NO: 3654 - RNA, 19 nt, Artificial Sequence
  Synthetic
cugucgaggcucugcagaa

SEQ ID NO: 3655 - RNA, 19 nt, Artificial Sequence
  Synthetic
cggcuggccuucaggaucu

SEQ ID NO: 3656 - RNA, 19 nt, Artificial Sequence
  Synthetic
ggccagggguucagugaga

SEQ ID NO: 3657 - RNA, 19 nt, Artificial Sequence
  Synthetic
ccagcuaggcagccacaga

SEQ ID NO: 3658 - RNA, 19 nt, Artificial Sequence
  Synthetic
gagcucaaccugcaacuuu

SEQ ID NO: 3659 - RNA, 19 nt, Artificial Sequence
  Synthetic
ccacuggaagucucaggua

SEQ ID NO: 3660 - RNA, 19 nt, Artificial Sequence
  Synthetic
caaccugcgcuuacuggau

SEQ ID NO: 3661 - RNA, 19 nt, Artificial Sequence
  Synthetic
ggucaaggcggagaagaag

SEQ ID NO: 3662 - RNA, 19 nt, Artificial Sequence
  Synthetic
ccuccaccuuugcccaauu

SEQ ID NO: 3663 - RNA, 19 nt, Artificial Sequence
  Synthetic
ggcccuggcugccuucuua

SEQ ID NO: 3664 - RNA, 19 nt, Artificial Sequence
  Synthetic
cagaaguggugccauacac

SEQ ID NO: 3665 - RNA, 19 nt, Artificial Sequence
  Synthetic
cuggaagucucagcuggua

SEQ ID NO: 3666 - RNA, 19 nt, Artificial Sequence
  Synthetic
gcaacuuugugagcaacga

SEQ ID NO: 3667 - RNA, 19 nt, Artificial Sequence
  Synthetic
ggcaucaaccguaauagca

SEQ ID NO: 3668 - RNA, 19 nt, Artificial Sequence
  Synthetic
cccaauuucagauauuuga

SEQ ID NO: 3669 - RNA, 19 nt, Artificial Sequence
  Synthetic
acugucagcucugugauca

SEQ ID NO: 3670 - RNA, 19 nt, Artificial Sequence
  Synthetic
gcucaaccugcaacuuugu

SEQ ID NO: 3671 - RNA, 19 nt, Artificial Sequence
  Synthetic
ugcgagaacuggacuugag

SEQ ID NO: 3672 - RNA, 19 nt, Artificial Sequence
  Synthetic
ccacuaaagcccagaagaa

SEQ ID NO: 3673 - RNA, 19 nt, Artificial Sequence
  Synthetic
ccaaagaaacgaagcaaga

SEQ ID NO: 3674 - RNA, 19 nt, Artificial Sequence
  Synthetic
gcagggagauccagagaau

SEQ ID NO: 3675 - RNA, 19 nt, Artificial Sequence
  Synthetic
agugaaagccacagaguuu

SEQ ID NO: 3676 - RNA, 19 nt, Artificial Sequence
  Synthetic
ccacacagcccaaagauua

SEQ ID NO: 3677 - RNA, 19 nt, Artificial Sequence
  Synthetic
gcaacagaggccaaagaaa

SEQ ID NO: 3678 - RNA, 19 nt, Artificial Sequence
  Synthetic
ucagauagccagaagaaau

SEQ ID NO: 3679 - RNA, 19 nt, Artificial Sequence
  Synthetic
cgagugagcugguuuaaua

SEQ ID NO: 3680 - RNA, 19 nt, Artificial Sequence
  Synthetic
ggguuaaguuuguaagugu

SEQ ID NO: 3681 - RNA, 19 nt, Artificial Sequence
  Synthetic
ccgggaagguuauuaggaa

SEQ ID NO: 3682 - RNA, 19 nt, Artificial Sequence
  Synthetic
gaagcaagacaaacagcaa

SEQ ID NO: 3683 - RNA, 19 nt, Artificial Sequence
  Synthetic
aaacgaagcaagacaaaca

SEQ ID NO: 3684 - RNA, 19 nt, Artificial Sequence
  Synthetic
agacaaagcugacuguuca

SEQ ID NO: 3685 - RNA, 19 nt, Artificial Sequence
  Synthetic
ggaaacagcucagcagauu

SEQ ID NO: 3686 - RNA, 19 nt, Artificial Sequence
  Synthetic
caacagaggccaaagaaac

SEQ ID NO: 3687 - RNA, 19 nt, Artificial Sequence
  Synthetic
cagauagccagaagaaauu

SEQ ID NO: 3688 - RNA, 19 nt, Artificial Sequence
  Synthetic
ccugauauguccaccgaau

SEQ ID NO: 3689 - RNA, 19 nt, Artificial Sequence
  Synthetic
ccaaaggucucacuaggaa

SEQ ID NO: 3690 - RNA, 19 nt, Artificial Sequence
  Synthetic
gaacaauggcaaacaguac

SEQ ID NO: 3691 - RNA, 19 nt, Artificial Sequence
  Synthetic
caacaaugccagaugaaug

SEQ ID NO: 3692 - RNA, 19 nt, Artificial Sequence
  Synthetic
gagcagagauacccauaca

SEQ ID NO: 3693 - RNA, 19 nt, Artificial Sequence
  Synthetic
gggaacacauguccucaaa

SEQ ID NO: 3694 - RNA, 19 nt, Artificial Sequence
  Synthetic
uggaguaccucgccaagaa

SEQ ID NO: 3695 - RNA, 19 nt, Artificial Sequence
  Synthetic
ugaaagccacagaguuuaa

SEQ ID NO: 3696 - RNA, 19 nt, Artificial Sequence
  Synthetic
ggucucacuaggaaauuua

SEQ ID NO: 3697 - RNA, 19 nt, Artificial Sequence
  Synthetic
cgaacaauggcaaacagua

SEQ ID NO: 3698 - RNA, 19 nt, Artificial Sequence
  Synthetic
acaaauacuuucugcauuc

SEQ ID NO: 3699 - RNA, 19 nt, Artificial Sequence
  Synthetic
ggucauuuguaggcaguuu

SEQ ID NO: 3700 - RNA, 19 nt, Artificial Sequence
  Synthetic
uaccauagcacuuugcaua

SEQ ID NO: 3701 - RNA, 19 nt, Artificial Sequence
  Synthetic
gcaaaggcagcucgagcau

SEQ ID NO: 3702 - RNA, 19 nt, Artificial Sequence
  Synthetic
aacaaauccugcagugaaa

SEQ ID NO: 3703 - RNA, 19 nt, Artificial Sequence
  Synthetic
caagggugagugugaaaua

SEQ ID NO: 3704 - RNA, 19 nt, Artificial Sequence
  Synthetic
aaacaaauccugcagugaa

SEQ ID NO: 3705 - RNA, 19 nt, Artificial Sequence
  Synthetic
cgagcaggccggagcuauu

SEQ ID NO: 3706 - RNA, 19 nt, Artificial Sequence
  Synthetic
ggacguaagcgcucugaga

SEQ ID NO: 3707 - RNA, 19 nt, Artificial Sequence
  Synthetic
aauuugagccaucgaggaa

SEQ ID NO: 3708 - RNA, 19 nt, Artificial Sequence
  Synthetic
aaugugagcuggaaggcau

SEQ ID NO: 3709 - RNA, 19 nt, Artificial Sequence
  Synthetic
caaccuacggcuggaauuu

SEQ ID NO: 3710 - RNA, 19 nt, Artificial Sequence
  Synthetic
cgaccacauucacaaccua

SEQ ID NO: 3711 - RNA, 19 nt, Artificial Sequence
  Synthetic
gggugagugugaaauaaac

SEQ ID NO: 3712 - RNA, 19 nt, Artificial Sequence
  Synthetic
aagggugagugugaaauaa

SEQ ID NO: 3713 - RNA, 19 nt, Artificial Sequence
  Synthetic
uaaacaaauccugcaguga

SEQ ID NO: 3714 - RNA, 19 nt, Artificial Sequence
  Synthetic
gccugcaccuagccaguuu

SEQ ID NO: 3715 - RNA, 19 nt, Artificial Sequence
  Synthetic
gcaccuauacccucaagcu

SEQ ID NO: 3716 - RNA, 19 nt, Artificial Sequence
  Synthetic
accuacggcuggaauuuga

SEQ ID NO: 3717 - RNA, 19 nt, Artificial Sequence
  Synthetic
ugcgcgaggugcauuguuu

SEQ ID NO: 3718 - RNA, 19 nt, Artificial Sequence
  Synthetic
ggacaacaguacccuagug

SEQ ID NO: 3719 - RNA, 19 nt, Artificial Sequence
  Synthetic
gagugcuagugccuucuuu

SEQ ID NO: 3720 - RNA, 19 nt, Artificial Sequence
  Synthetic
gagcaggccggagcuauug

SEQ ID NO: 3721 - RNA, 19 nt, Artificial Sequence
  Synthetic
gcgcaccuauacccucaag

SEQ ID NO: 3722 - RNA, 19 nt, Artificial Sequence
  Synthetic
ucacauauauucugagcuu

SEQ ID NO: 3723 - RNA, 19 nt, Artificial Sequence
  Synthetic
cuggagaugcucacauaua

SEQ ID NO: 3724 - RNA, 19 nt, Artificial Sequence
  Synthetic
gcugacagaugcaggaugu

SEQ ID NO: 3725 - RNA, 19 nt, Artificial Sequence
  Synthetic
ggccaaggcugcagcaucu

SEQ ID NO: 3726 - RNA, 19 nt, Artificial Sequence
  Synthetic
ugccagaacucacagacaa

SEQ ID NO: 3727 - RNA, 19 nt, Artificial Sequence
  Synthetic
ggagaugcucacauauauu

SEQ ID NO: 3728 - RNA, 19 nt, Artificial Sequence
  Synthetic
gagcaucaggccucaggua

SEQ ID NO: 3729 - RNA, 19 nt, Artificial Sequence
  Synthetic
cccuggagaugcucacaua

SEQ ID NO: 3730 - RNA, 19 nt, Artificial Sequence
  Synthetic
guaccgugcugcccagaau

SEQ ID NO: 3731 - RNA, 19 nt, Artificial Sequence
  Synthetic
gauuaaacauuccagauag

SEQ ID NO: 3732 - RNA, 19 nt, Artificial Sequence
  Synthetic
ccaaggugcuccaguuucu

SEQ ID NO: 3733 - RNA, 19 nt, Artificial Sequence
  Synthetic
guccuagccuggagcacuu

SEQ ID NO: 3734 - RNA, 19 nt, Artificial Sequence
  Synthetic
uggagaugcucacauauau

SEQ ID NO: 3735 - RNA, 19 nt, Artificial Sequence
  Synthetic
gcagacacuggaugcuauu

SEQ ID NO: 3736 - RNA, 19 nt, Artificial Sequence
  Synthetic
uagccaaggugcuccaguu

SEQ ID NO: 3737 - RNA, 19 nt, Artificial Sequence
  Synthetic
ggucugugcuguaaauccu

SEQ ID NO: 3738 - RNA, 19 nt, Artificial Sequence
  Synthetic
gcccacugcucuucauuga

SEQ ID NO: 3739 - RNA, 19 nt, Artificial Sequence
  Synthetic
cuaggucugugcuguaaau

SEQ ID NO: 3740 - RNA, 19 nt, Artificial Sequence
  Synthetic
aggccucccucgugaguug

SEQ ID NO: 3741 - RNA, 19 nt, Artificial Sequence
  Synthetic
cugaggcagcugucccuua

SEQ ID NO: 3742 - RNA, 19 nt, Artificial Sequence
  Synthetic
gccuaggucugugcuguaa

SEQ ID NO: 3743 - RNA, 19 nt, Artificial Sequence
  Synthetic
caucaggccucagguacca

SEQ ID NO: 3744 - RNA, 19 nt, Artificial Sequence
  Synthetic
cagcacagccuccuugacu

SEQ ID NO: 3745 - RNA, 19 nt, Artificial Sequence
  Synthetic
gggcugaccugacccuaac

SEQ ID NO: 3746 - RNA, 19 nt, Artificial Sequence
  Synthetic
gaaaugcuaccuacguguu

SEQ ID NO: 3747 - RNA, 19 nt, Artificial Sequence
  Synthetic
gcagccgacucagugacaa

SEQ ID NO: 3748 - RNA, 19 nt, Artificial Sequence
  Synthetic
cagcugagccuaggucugu

SEQ ID NO: 3749 - RNA, 19 nt, Artificial Sequence
  Synthetic
augcucacauauauucuga

SEQ ID NO: 3750 - RNA, 19 nt, Artificial Sequence
  Synthetic
gaccugacccuaacacucu

SEQ ID NO: 3751 - RNA, 19 nt, Artificial Sequence
  Synthetic
ucugugcuguaaauccuaa

SEQ ID NO: 3752 - RNA, 19 nt, Artificial Sequence
  Synthetic
gagccaagauggaaggaaa

SEQ ID NO: 3753 - RNA, 19 nt, Artificial Sequence
  Synthetic
agacagagcuggagaagga

SEQ ID NO: 3754 - RNA, 19 nt, Artificial Sequence
  Synthetic
ggaaauaccaucuacgcua

SEQ ID NO: 3755 - RNA, 19 nt, Artificial Sequence
  Synthetic
ccacagggcucaagagaac

SEQ ID NO: 3756 - RNA, 19 nt, Artificial Sequence
  Synthetic
cguccuuggcaaugggaaa

SEQ ID NO: 3757 - RNA, 19 nt, Artificial Sequence
  Synthetic
gcaacaacauuuaccacaa

SEQ ID NO: 3758 - RNA, 19 nt, Artificial Sequence
  Synthetic
caacagaggccacggcauu

SEQ ID NO: 3759 - RNA, 19 nt, Artificial Sequence
  Synthetic
gggcagaaggugacagcca

SEQ ID NO: 3760 - RNA, 19 nt, Artificial Sequence
  Synthetic
cauaauagcaagaucauca

SEQ ID NO: 3761 - RNA, 19 nt, Artificial Sequence
  Synthetic
gcauagcagugaaugagaa

SEQ ID NO: 3762 - RNA, 19 nt, Artificial Sequence
  Synthetic
guacgaagagcaaggugaa

SEQ ID NO: 3763 - RNA, 19 nt, Artificial Sequence
  Synthetic
ggaaaggcaucauccggaa

SEQ ID NO: 3764 - RNA, 19 nt, Artificial Sequence
  Synthetic
cccaaagaccugugacauu

SEQ ID NO: 3765 - RNA, 19 nt, Artificial Sequence
  Synthetic
cagcugauguacagacuau

SEQ ID NO: 3766 - RNA, 19 nt, Artificial Sequence
  Synthetic
gcaaugguaucuaugacaa

SEQ ID NO: 3767 - RNA, 19 nt, Artificial Sequence
  Synthetic
gcaaaggccucaucacaga

SEQ ID NO: 3768 - RNA, 19 nt, Artificial Sequence
  Synthetic
acaacaaguuccuggucuu

SEQ ID NO: 3769 - RNA, 19 nt, Artificial Sequence
  Synthetic
aggaugaagaugaggacca

SEQ ID NO: 3770 - RNA, 19 nt, Artificial Sequence
  Synthetic
cugcauguguaauaaagaa

SEQ ID NO: 3771 - RNA, 19 nt, Artificial Sequence
  Synthetic
acaucaucuuccagggcaa

SEQ ID NO: 3772 - RNA, 19 nt, Artificial Sequence
  Synthetic
agguugaggcccagugcaa

SEQ ID NO: 3773 - RNA, 19 nt, Artificial Sequence
  Synthetic
gcggugaggaugaagauga

SEQ ID NO: 3774 - RNA, 19 nt, Artificial Sequence
  Synthetic
gaaauaccaucuacgcuaa

SEQ ID NO: 3775 - RNA, 19 nt, Artificial Sequence
  Synthetic
caauaaggaggcuggcauu

SEQ ID NO: 3776 - RNA, 19 nt, Artificial Sequence
  Synthetic
gaauuugugggcagugaaa

SEQ ID NO: 3777 - RNA, 19 nt, Artificial Sequence
  Synthetic
gggagacagagcuggagaa

SEQ ID NO: 3778 - RNA, 19 nt, Artificial Sequence
  Synthetic
gcagauaagaacugggccu

SEQ ID NO: 3779 - RNA, 19 nt, Artificial Sequence
  Synthetic
cacaaugggcagaagguga

SEQ ID NO: 3780 - RNA, 19 nt, Artificial Sequence
  Synthetic
ccaauaaggaggcuggcau

SEQ ID NO: 3781 - RNA, 19 nt, Artificial Sequence
  Synthetic
ccagcaaccacgucagcua

SEQ ID NO: 3782 - RNA, 19 nt, Artificial Sequence
  Synthetic
ggacagaagugaagaaaau

SEQ ID NO: 3783 - RNA, 19 nt, Artificial Sequence
  Synthetic
ggauuaagacagauaguaa

SEQ ID NO: 3784 - RNA, 19 nt, Artificial Sequence
  Synthetic
gaguaauagaagagaauga

SEQ ID NO: 3785 - RNA, 19 nt, Artificial Sequence
  Synthetic
guauaaaggugcacaugua

SEQ ID NO: 3786 - RNA, 19 nt, Artificial Sequence
  Synthetic
agggaauauaugaggauaa

SEQ ID NO: 3787 - RNA, 19 nt, Artificial Sequence
  Synthetic
gugcaagagugucuggaaa

SEQ ID NO: 3788 - RNA, 19 nt, Artificial Sequence
  Synthetic
uguagaagguagauaagaa

SEQ ID NO: 3789 - RNA, 19 nt, Artificial Sequence
  Synthetic
ugggcagacuggaggaaua

SEQ ID NO: 3790 - RNA, 19 nt, Artificial Sequence
  Synthetic
aggaagagacuguauuaaa

SEQ ID NO: 3791 - RNA, 19 nt, Artificial Sequence
  Synthetic
aggaguaauagaagagaau

SEQ ID NO: 3792 - RNA, 19 nt, Artificial Sequence
  Synthetic
caauggacauggagugcua

SEQ ID NO: 3793 - RNA, 19 nt, Artificial Sequence
  Synthetic
cagaugaagugguucuaaa

SEQ ID NO: 3794 - RNA, 19 nt, Artificial Sequence
  Synthetic
ccaaaucccuggaaagaga

SEQ ID NO: 3795 - RNA, 19 nt, Artificial Sequence
  Synthetic
gauuaauccagaagaguau

SEQ ID NO: 3796 - RNA, 19 nt, Artificial Sequence
  Synthetic
ugggaaaguggcagacaaa

SEQ ID NO: 3797 - RNA, 19 nt, Artificial Sequence
  Synthetic
cugaacauuucuacaguaa

SEQ ID NO: 3798 - RNA, 19 nt, Artificial Sequence
  Synthetic
ggagaaacugccagaugaa

SEQ ID NO: 3799 - RNA, 19 nt, Artificial Sequence
  Synthetic
ccugcaagauauaaaggaa

SEQ ID NO: 3800 - RNA, 19 nt, Artificial Sequence
  Synthetic
gggacaaggaguaauagaa

SEQ ID NO: 3801 - RNA, 19 nt, Artificial Sequence
  Synthetic
guuuaacccugaugacaaa

SEQ ID NO: 3802 - RNA, 19 nt, Artificial Sequence
  Synthetic
aggaagggaugcacuguaa

SEQ ID NO: 3803 - RNA, 19 nt, Artificial Sequence
  Synthetic
ggaagagacuguauuaaaa

SEQ ID NO: 3804 - RNA, 19 nt, Artificial Sequence
  Synthetic
ggauuuaugugcaugaaaa

SEQ ID NO: 3805 - RNA, 19 nt, Artificial Sequence
  Synthetic
gggaauauaugaggauaau

SEQ ID NO: 3806 - RNA, 19 nt, Artificial Sequence
  Synthetic
aaaccaauuuccugcauua

SEQ ID NO: 3807 - RNA, 19 nt, Artificial Sequence
  Synthetic
ggaaaguggcagacaaagu

SEQ ID NO: 3808 - RNA, 19 nt, Artificial Sequence
  Synthetic
gaacaaucaagaugccaua

SEQ ID NO: 3809 - RNA, 19 nt, Artificial Sequence
  Synthetic
cccaauuauuagacggaau

SEQ ID NO: 3810 - RNA, 19 nt, Artificial Sequence
  Synthetic
agauuaauccagaagagua

SEQ ID NO: 3811 - RNA, 19 nt, Artificial Sequence
  Synthetic
aggaagaggacaauucaua

SEQ ID NO: 3812 - RNA, 19 nt, Artificial Sequence
  Synthetic
ggauauacaugcaggaaaa

SEQ ID NO: 3813 - RNA, 19 nt, Artificial Sequence
  Synthetic
gcagagaacucaaagauau

SEQ ID NO: 3814 - RNA, 19 nt, Artificial Sequence
  Synthetic
ggacaaacucacugaugaa

SEQ ID NO: 3815 - RNA, 19 nt, Artificial Sequence
  Synthetic
gcugaugagaugugauaaa

SEQ ID NO: 3816 - RNA, 19 nt, Artificial Sequence
  Synthetic
guuaauagcuugaugucau

SEQ ID NO: 3817 - RNA, 19 nt, Artificial Sequence
  Synthetic
caacagaggccaauaucua

SEQ ID NO: 3818 - RNA, 19 nt, Artificial Sequence
  Synthetic
cugaugaauuguuggaaaa

SEQ ID NO: 3819 - RNA, 19 nt, Artificial Sequence
  Synthetic
acugaugaauuguuggaaa

SEQ ID NO: 3820 - RNA, 19 nt, Artificial Sequence
  Synthetic
agaaagugcauguaggcaa

SEQ ID NO: 3821 - RNA, 19 nt, Artificial Sequence
  Synthetic
aaugaaaccgugauggaaa

SEQ ID NO: 3822 - RNA, 19 nt, Artificial Sequence
  Synthetic
gcaucaagaagucagaaua

SEQ ID NO: 3823 - RNA, 19 nt, Artificial Sequence
  Synthetic
caauagagacuguggaugu

SEQ ID NO: 3824 - RNA, 19 nt, Artificial Sequence
  Synthetic
ugucugaacuggaucauaa

SEQ ID NO: 3825 - RNA, 19 nt, Artificial Sequence
  Synthetic
gggcugaugagaugugaua

SEQ ID NO: 3826 - RNA, 19 nt, Artificial Sequence
  Synthetic
caucaagaagucagaauau

SEQ ID NO: 3827 - RNA, 19 nt, Artificial Sequence
  Synthetic
gcuaagggcugucugaaau

SEQ ID NO: 3828 - RNA, 19 nt, Artificial Sequence
  Synthetic
ucacugaacuggauaauga

SEQ ID NO: 3829 - RNA, 19 nt, Artificial Sequence
  Synthetic
gaugagaugugauaaagua

SEQ ID NO: 3830 - RNA, 19 nt, Artificial Sequence
  Synthetic
aggauauacaugcaggaaa

SEQ ID NO: 3831 - RNA, 19 nt, Artificial Sequence
  Synthetic
cagcaugacaauagagacu

SEQ ID NO: 3832 - RNA, 19 nt, Artificial Sequence
  Synthetic
cguauguguuuuagcauuu

SEQ ID NO: 3833 - RNA, 19 nt, Artificial Sequence
  Synthetic
acgaagugacgguggaaca

SEQ ID NO: 3834 - RNA, 19 nt, Artificial Sequence
  Synthetic
cagagaacucaaagauauu

SEQ ID NO: 3835 - RNA, 19 nt, Artificial Sequence
  Synthetic
gugauaaagucaacgaagu

SEQ ID NO: 3836 - RNA, 19 nt, Artificial Sequence
  Synthetic
guguggaggucauugcaaa

SEQ ID NO: 3837 - RNA, 19 nt, Artificial Sequence
  Synthetic
uaaagaaaucacagaccaa

SEQ ID NO: 3838 - RNA, 19 nt, Artificial Sequence
  Synthetic
gauaauggcguauguguuu

SEQ ID NO: 3839 - RNA, 19 nt, Artificial Sequence
  Synthetic
gagaugugauaaaguaaga

SEQ ID NO: 3840 - RNA, 19 nt, Artificial Sequence
  Synthetic
augaaaccgugauggaaau

SEQ ID NO: 3841 - RNA, 19 nt, Artificial Sequence
  Synthetic
gggcgauacagcaugacaa

SEQ ID NO: 3842 - RNA, 19 nt, Artificial Sequence
  Synthetic
ccucagaauauuugguuua

SEQ ID NO: 3843 - RNA, 19 nt, Artificial Sequence
  Synthetic
gggcaauuauacugaaaga

SEQ ID NO: 3844 - RNA, 19 nt, Artificial Sequence
  Synthetic
ucagagagaccgaagaaua

SEQ ID NO: 3845 - RNA, 19 nt, Artificial Sequence
  Synthetic
gguuauuggaagaaagaau

SEQ ID NO: 3846 - RNA, 19 nt, Artificial Sequence
  Synthetic
aggauaaagaagcugguua

SEQ ID NO: 3847 - RNA, 19 nt, Artificial Sequence
  Synthetic
gcaagaucaaauuggaaau

SEQ ID NO: 3848 - RNA, 19 nt, Artificial Sequence
  Synthetic
gaucagagagaccgaagaa

SEQ ID NO: 3849 - RNA, 19 nt, Artificial Sequence
  Synthetic
uguuauaugguauggcaaa

SEQ ID NO: 3850 - RNA, 19 nt, Artificial Sequence
  Synthetic
gcucuagcuucuugggaca

SEQ ID NO: 3851 - RNA, 19 nt, Artificial Sequence
  Synthetic
ggacuacguugaugcggaa

SEQ ID NO: 3852 - RNA, 19 nt, Artificial Sequence
  Synthetic
ggacguaacucuuuuggau

SEQ ID NO: 3853 - RNA, 19 nt, Artificial Sequence
  Synthetic
gaagcugguuauuggaaga

SEQ ID NO: 3854 - RNA, 19 nt, Artificial Sequence
  Synthetic
aagaauauaucauggagca

SEQ ID NO: 3855 - RNA, 19 nt, Artificial Sequence
  Synthetic
guauaaaacucccaccaaa

SEQ ID NO: 3856 - RNA, 19 nt, Artificial Sequence
  Synthetic
uguggaagaaggaggaaga

SEQ ID NO: 3857 - RNA, 19 nt, Artificial Sequence
  Synthetic
auaaagaguuguuccauga

SEQ ID NO: 3858 - RNA, 19 nt, Artificial Sequence
  Synthetic
caaaguacaaucugaguca

SEQ ID NO: 3859 - RNA, 19 nt, Artificial Sequence
  Synthetic
acguggagcugguguggau

SEQ ID NO: 3860 - RNA, 19 nt, Artificial Sequence
  Synthetic
cguugaugcggaaggaaga

SEQ ID NO: 3861 - RNA, 19 nt, Artificial Sequence
  Synthetic
aguauggacugcacggcua

SEQ ID NO: 3862 - RNA, 19 nt, Artificial Sequence
  Synthetic
ucaaugaugucgaggagaa

SEQ ID NO: 3863 - RNA, 19 nt, Artificial Sequence
  Synthetic
aagcaauucuccagaggaa

SEQ ID NO: 3864 - RNA, 19 nt, Artificial Sequence
  Synthetic
gcugaaauguuuacgguuu

SEQ ID NO: 3865 - RNA, 19 nt, Artificial Sequence
  Synthetic
cagcagaagcccuggacuu

SEQ ID NO: 3866 - RNA, 19 nt, Artificial Sequence
  Synthetic
gauaagcacccaacagaua

SEQ ID NO: 3867 - RNA, 19 nt, Artificial Sequence
  Synthetic
agagaaaauuccagcagaa

SEQ ID NO: 3868 - RNA, 19 nt, Artificial Sequence
  Synthetic
ccagcaaggaagaagaaaa

SEQ ID NO: 3869 - RNA, 19 nt, Artificial Sequence
  Synthetic
ggacagaacuaggcuaaga

SEQ ID NO: 3870 - RNA, 19 nt, Artificial Sequence
  Synthetic
caaugaugucgaggagaaa

SEQ ID NO: 3871 - RNA, 19 nt, Artificial Sequence
  Synthetic
gguauuugaagaaagaaga

SEQ ID NO: 3872 - RNA, 19 nt, Artificial Sequence
  Synthetic
ucaaauggugaaagaacuu

SEQ ID NO: 3873 - RNA, 19 nt, Artificial Sequence
  Synthetic
caacuaguuacaagcaauu

SEQ ID NO: 3874 - RNA, 19 nt, Artificial Sequence
  Synthetic
gucccaaaaugcagacaaa

SEQ ID NO: 3875 - RNA, 19 nt, Artificial Sequence
  Synthetic
aagaauaacucaggggaga

SEQ ID NO: 3876 - RNA, 19 nt, Artificial Sequence
  Synthetic
gagcaggggaucuggaaga

SEQ ID NO: 3877 - RNA, 19 nt, Artificial Sequence
  Synthetic
gagccaagcuuguguguaa

SEQ ID NO: 3878 - RNA, 19 nt, Artificial Sequence
  Synthetic
ggucaaagauggacaaaca

SEQ ID NO: 3879 - RNA, 19 nt, Artificial Sequence
  Synthetic
gggauuaacaucagcaaua

SEQ ID NO: 3880 - RNA, 19 nt, Artificial Sequence
  Synthetic
ggaaauagcuuauguggga

SEQ ID NO: 3881 - RNA, 19 nt, Artificial Sequence
  Synthetic
ccugaugaaugaagagcaa

SEQ ID NO: 3882 - RNA, 19 nt, Artificial Sequence
  Synthetic
gggauguucuuuugauaaa

SEQ ID NO: 3883 - RNA, 19 nt, Artificial Sequence
  Synthetic
gccuauaucuucaggagaa

SEQ ID NO: 3884 - RNA, 19 nt, Artificial Sequence
  Synthetic
gaagaugggugcacaaaga

SEQ ID NO: 3885 - RNA, 19 nt, Artificial Sequence
  Synthetic
aagcagagcugacaagcaa

SEQ ID NO: 3886 - RNA, 19 nt, Artificial Sequence
  Synthetic
gugccugagucaugugaua

SEQ ID NO: 3887 - RNA, 19 nt, Artificial Sequence
  Synthetic
gaagaacggaggaaacaaa

SEQ ID NO: 3888 - RNA, 19 nt, Artificial Sequence
  Synthetic
ccucaacgcuggucaagua

SEQ ID NO: 3889 - RNA, 19 nt, Artificial Sequence
  Synthetic
uauccuaaaccgagaacaa

SEQ ID NO: 3890 - RNA, 19 nt, Artificial Sequence
  Synthetic
cuuucaaggugucuagaua

SEQ ID NO: 3891 - RNA, 19 nt, Artificial Sequence
  Synthetic
agggaaggguggauucaua

SEQ ID NO: 3892 - RNA, 19 nt, Artificial Sequence
  Synthetic
ccaacuuacacaugaacaa

SEQ ID NO: 3893 - RNA, 19 nt, Artificial Sequence
  Synthetic
gcugaaaugagacgguuua

SEQ ID NO: 3894 - RNA, 19 nt, Artificial Sequence
  Synthetic
uggaagaccucuauuggaa

SEQ ID NO: 3895 - RNA, 19 nt, Artificial Sequence
  Synthetic
cggaaguaccagucaaaga

SEQ ID NO: 3896 - RNA, 19 nt, Artificial Sequence
  Synthetic
gcauuagaggugacgcaaa

SEQ ID NO: 3897 - RNA, 19 nt, Artificial Sequence
  Synthetic
ccacaaaaguuaaagagga

SEQ ID NO: 3898 - RNA, 19 nt, Artificial Sequence
  Synthetic
ccuauuugguguaagaaca

SEQ ID NO: 3899 - RNA, 19 nt, Artificial Sequence
  Synthetic
gcaauaggauucacuacaa

SEQ ID NO: 3900 - RNA, 19 nt, Artificial Sequence
  Synthetic
gcaccaaugacauggccaa

SEQ ID NO: 3901 - RNA, 19 nt, Artificial Sequence
  Synthetic
ggucaaguaugcagagaag

SEQ ID NO: 3902 - RNA, 19 nt, Artificial Sequence
  Synthetic
caaagaagaaguugaaucu

SEQ ID NO: 3903 - RNA, 19 nt, Artificial Sequence
  Synthetic
guguguaagacucuagaaa

SEQ ID NO: 3904 - RNA, 19 nt, Artificial Sequence
  Synthetic
ccucgucauuaaagacaaa

SEQ ID NO: 3905 - RNA, 19 nt, Artificial Sequence
  Synthetic
gauacagagugaagaaugu

SEQ ID NO: 3906 - RNA, 19 nt, Artificial Sequence
  Synthetic
gcacagaagaggcgcacca

SEQ ID NO: 3907 - RNA, 19 nt, Artificial Sequence
  Synthetic
gagaaguuuuguuggcaua

SEQ ID NO: 3908 - RNA, 19 nt, Artificial Sequence
  Synthetic
guagauaggccuuaacuua

SEQ ID NO: 3909 - RNA, 19 nt, Artificial Sequence
  Synthetic
caaagugggcucucaauaa

SEQ ID NO: 3910 - RNA, 19 nt, Artificial Sequence
  Synthetic
gagcagggagagagaaguu

SEQ ID NO: 3911 - RNA, 19 nt, Artificial Sequence
  Synthetic
augagagcgucaagaagua

SEQ ID NO: 3912 - RNA, 19 nt, Artificial Sequence
  Synthetic
gcauagguuugcuuaggua

SEQ ID NO: 3913 - RNA, 19 nt, Artificial Sequence
  Synthetic
cggccaucguggugaagga

SEQ ID NO: 3914 - RNA, 19 nt, Artificial Sequence
  Synthetic
acgagaacgugcuggcuga

SEQ ID NO: 3915 - RNA, 19 nt, Artificial Sequence
  Synthetic
gggaagaggacuuggaagg

SEQ ID NO: 3916 - RNA, 19 nt, Artificial Sequence
  Synthetic
ucauugaccugcaggcuga

SEQ ID NO: 3917 - RNA, 19 nt, Artificial Sequence
  Synthetic
acaaagugggcucucaaua

SEQ ID NO: 3918 - RNA, 19 nt, Artificial Sequence
  Synthetic
gcaaagcacaggucauuga

SEQ ID NO: 3919 - RNA, 19 nt, Artificial Sequence
  Synthetic
acgaugagagcgucaagaa

SEQ ID NO: 3920 - RNA, 19 nt, Artificial Sequence
  Synthetic
ccguuaagcuacuguccga

SEQ ID NO: 3921 - RNA, 19 nt, Artificial Sequence
  Synthetic
aaagugggcucucaauaaa

SEQ ID NO: 3922 - RNA, 19 nt, Artificial Sequence
  Synthetic
ggagcugccuggagacagu

SEQ ID NO: 3923 - RNA, 19 nt, Artificial Sequence
  Synthetic
ucuacgagcucaccguuaa

SEQ ID NO: 3924 - RNA, 19 nt, Artificial Sequence
  Synthetic
gcagggagagagaaguuuu

SEQ ID NO: 3925 - RNA, 19 nt, Artificial Sequence
  Synthetic
uggaggagcugccuggaga

SEQ ID NO: 3926 - RNA, 19 nt, Artificial Sequence
  Synthetic
gaugagagcgucaagaagu

SEQ ID NO: 3927 - RNA, 19 nt, Artificial Sequence
  Synthetic
gaggguagauaggccuuaa

SEQ ID NO: 3928 - RNA, 19 nt, Artificial Sequence
  Synthetic
ucgcaaagcacaggucauu

SEQ ID NO: 3929 - RNA, 19 nt, Artificial Sequence
  Synthetic
caaaggucgaggguagaua

SEQ ID NO: 3930 - RNA, 19 nt, Artificial Sequence
  Synthetic
agaacgugcuggcugaguu

SEQ ID NO: 3931 - RNA, 19 nt, Artificial Sequence
  Synthetic
agugggcucucaauaaaua

SEQ ID NO: 3932 - RNA, 19 nt, Artificial Sequence
  Synthetic
ggagagagaaguuuuguug

SEQ ID NO: 3933 - RNA, 19 nt, Artificial Sequence
  Synthetic
ggccuuaacuuaguccaua

SEQ ID NO: 3934 - RNA, 19 nt, Artificial Sequence
  Synthetic
agauaggccuuaacuuagu

SEQ ID NO: 3935 - RNA, 19 nt, Artificial Sequence
  Synthetic
uagccggcuucuagaaugu

SEQ ID NO: 3936 - RNA, 19 nt, Artificial Sequence
  Synthetic
gcaaaggucgaggguagau

SEQ ID NO: 3937 - RNA, 19 nt, Artificial Sequence
  Synthetic
cauagaugcuuuugggaaa

SEQ ID NO: 3938 - RNA, 19 nt, Artificial Sequence
  Synthetic
gugcaaagaaagagaacau

SEQ ID NO: 3939 - RNA, 19 nt, Artificial Sequence
  Synthetic
cagaauauuuacagugcaa

SEQ ID NO: 3940 - RNA, 19 nt, Artificial Sequence
  Synthetic
gagguaaaguugugugcua

SEQ ID NO: 3941 - RNA, 19 nt, Artificial Sequence
  Synthetic
guaacugagcccagaguaa

SEQ ID NO: 3942 - RNA, 19 nt, Artificial Sequence
  Synthetic
ucuuagagauggagacauu

SEQ ID NO: 3943 - RNA, 19 nt, Artificial Sequence
  Synthetic
guguuggacuugugugaaa

SEQ ID NO: 3944 - RNA, 19 nt, Artificial Sequence
  Synthetic
aaauagaacuccagagcca

SEQ ID NO: 3945 - RNA, 19 nt, Artificial Sequence
  Synthetic
aggaugaacugguguguau

SEQ ID NO: 3946 - RNA, 19 nt, Artificial Sequence
  Synthetic
gaguauaaaguucggcaaa

SEQ ID NO: 3947 - RNA, 19 nt, Artificial Sequence
  Synthetic
gaauguggcagguuagaaa

SEQ ID NO: 3948 - RNA, 19 nt, Artificial Sequence
  Synthetic
agaagguguuacagagaau

SEQ ID NO: 3949 - RNA, 19 nt, Artificial Sequence
  Synthetic
ggugacaguuugugacauu

SEQ ID NO: 3950 - RNA, 19 nt, Artificial Sequence
  Synthetic
cgggugaggugcuggagua

SEQ ID NO: 3951 - RNA, 19 nt, Artificial Sequence
  Synthetic
ccuaaauauggaaggaaga

SEQ ID NO: 3952 - RNA, 19 nt, Artificial Sequence
  Synthetic
augaaacggugcagaauau

SEQ ID NO: 3953 - RNA, 19 nt, Artificial Sequence
  Synthetic
guuugaauguggcagguua

SEQ ID NO: 3954 - RNA, 19 nt, Artificial Sequence
  Synthetic
uguaauggcuucagugaca

SEQ ID NO: 3955 - RNA, 19 nt, Artificial Sequence
  Synthetic
uacagagaauggugggaaa

SEQ ID NO: 3956 - RNA, 19 nt, Artificial Sequence
  Synthetic
cgccuacacuagugaauua

SEQ ID NO: 3957 - RNA, 19 nt, Artificial Sequence
  Synthetic
agagaacauagaugaguaa

SEQ ID NO: 3958 - RNA, 19 nt, Artificial Sequence
  Synthetic
gcuauaacugugugaucua

SEQ ID NO: 3959 - RNA, 19 nt, Artificial Sequence
  Synthetic
cuguauauauugaccagua

SEQ ID NO: 3960 - RNA, 19 nt, Artificial Sequence
  Synthetic
aagagaacauagaugagua

SEQ ID NO: 3961 - RNA, 19 nt, Artificial Sequence
  Synthetic
agaaagagaacauagauga

SEQ ID NO: 3962 - RNA, 19 nt, Artificial Sequence
  Synthetic
ugaaagaaugcgaguacuu

SEQ ID NO: 3963 - RNA, 19 nt, Artificial Sequence
  Synthetic
caaagaaagagaacauaga

SEQ ID NO: 3964 - RNA, 19 nt, Artificial Sequence
  Synthetic
ucaauugguuggaagagua

SEQ ID NO: 3965 - RNA, 19 nt, Artificial Sequence
  Synthetic
cauaccagcuccugagaga

SEQ ID NO: 3966 - RNA, 19 nt, Artificial Sequence
  Synthetic
cagagaaggugcuugacau

SEQ ID NO: 3967 - RNA, 19 nt, Artificial Sequence
  Synthetic
ggaaauagaaauuggagaa

SEQ ID NO: 3968 - RNA, 19 nt, Artificial Sequence
  Synthetic
gaacaaaggaaguaaacua

SEQ ID NO: 3969 - RNA, 19 nt, Artificial Sequence
  Synthetic
ggaaauguaaugagguaaa

SEQ ID NO: 3970 - RNA, 19 nt, Artificial Sequence
  Synthetic
gaggaaauguaaugaggua

SEQ ID NO: 3971 - RNA, 19 nt, Artificial Sequence
  Synthetic
acaauuagguggacauaaa

SEQ ID NO: 3972 - RNA, 19 nt, Artificial Sequence
  Synthetic
ccauaagagagcaaggaaa

SEQ ID NO: 3973 - RNA, 19 nt, Artificial Sequence
  Synthetic
gcaccuucguguugaguaa

SEQ ID NO: 3974 - RNA, 19 nt, Artificial Sequence
  Synthetic
ggguaugccuccuagaaua

SEQ ID NO: 3975 - RNA, 19 nt, Artificial Sequence
  Synthetic
gggaaauggucucagguuu

SEQ ID NO: 3976 - RNA, 19 nt, Artificial Sequence
  Synthetic
acugauggcuggagaaauu

SEQ ID NO: 3977 - RNA, 19 nt, Artificial Sequence
  Synthetic
ggaaauggucucagguuuu

SEQ ID NO: 3978 - RNA, 19 nt, Artificial Sequence
  Synthetic
cauaagagagcaaggaaaa

SEQ ID NO: 3979 - RNA, 19 nt, Artificial Sequence
  Synthetic
gaaaagaacuaguauggaa

SEQ ID NO: 3980 - RNA, 19 nt, Artificial Sequence
  Synthetic
ucauguagcugcuguguaa

SEQ ID NO: 3981 - RNA, 19 nt, Artificial Sequence
  Synthetic
cagaauaguugguauguca

SEQ ID NO: 3982 - RNA, 19 nt, Artificial Sequence
  Synthetic
cagaggagcuugagaaugu

SEQ ID NO: 3983 - RNA, 19 nt, Artificial Sequence
  Synthetic
uggaaggagaauagcauua

SEQ ID NO: 3984 - RNA, 19 nt, Artificial Sequence
  Synthetic
ggaacuuuauauugaggaa

SEQ ID NO: 3985 - RNA, 19 nt, Artificial Sequence
  Synthetic
ugacaagacuaaucaguau

SEQ ID NO: 3986 - RNA, 19 nt, Artificial Sequence
  Synthetic
gaaaagaacccucuggaua

SEQ ID NO: 3987 - RNA, 19 nt, Artificial Sequence
  Synthetic
ggucuaaauagcuaacuaa

SEQ ID NO: 3988 - RNA, 19 nt, Artificial Sequence
  Synthetic
caagagagaaauuagcaua

SEQ ID NO: 3989 - RNA, 19 nt, Artificial Sequence
  Synthetic
gcaaaaggguauucaucaa

SEQ ID NO: 3990 - RNA, 19 nt, Artificial Sequence
  Synthetic
guugagagcuuuugcauca

SEQ ID NO: 3991 - RNA, 19 nt, Artificial Sequence
  Synthetic
uguaguagacauuggcuaa

SEQ ID NO: 3992 - RNA, 19 nt, Artificial Sequence
  Synthetic
ggaagagugucguggccau

SEQ ID NO: 3993 - RNA, 19 nt, Artificial Sequence
  Synthetic
gcuuacgguugaauaauua

SEQ ID NO: 3994 - RNA, 19 nt, Artificial Sequence
  Synthetic
gaaacaauuagguggacau

SEQ ID NO: 3995 - RNA, 19 nt, Artificial Sequence
  Synthetic
gaaguaggucuuuuagaua

SEQ ID NO: 3996 - RNA, 19 nt, Artificial Sequence
  Synthetic
uagaacacuugcaagguaa

SEQ ID NO: 3997 - RNA, 19 nt, Artificial Sequence
  Synthetic
acaagagauuugauggaua

SEQ ID NO: 3998 - RNA, 19 nt, Artificial Sequence
  Synthetic
cggagaagaugaaggagau

SEQ ID NO: 3999 - RNA, 19 nt, Artificial Sequence
  Synthetic
gagauuugauggauagaau

SEQ ID NO: 4000 - RNA, 19 nt, Artificial Sequence
  Synthetic
auaaaaggcugcagcgaaa

SEQ ID NO: 4001 - RNA, 19 nt, Artificial Sequence
  Synthetic
gaaucuucaugcaaggaaa

SEQ ID NO: 4002 - RNA, 19 nt, Artificial Sequence
  Synthetic
ggacaagagauuugaugga

SEQ ID NO: 4003 - RNA, 19 nt, Artificial Sequence
  Synthetic
guaaauaccucuacgucuu

SEQ ID NO: 4004 - RNA, 19 nt, Artificial Sequence
  Synthetic
acucuuugguagugaauga

SEQ ID NO: 4005 - RNA, 19 nt, Artificial Sequence
  Synthetic
gugacuguguugaggucua

SEQ ID NO: 4006 - RNA, 19 nt, Artificial Sequence
  Synthetic
cagaggaaggaaagaucua

SEQ ID NO: 4007 - RNA, 19 nt, Artificial Sequence
  Synthetic
cuaaggaggaggcggguga

SEQ ID NO: 4008 - RNA, 19 nt, Artificial Sequence
  Synthetic
ucgucaagcuccaagucaa

SEQ ID NO: 4009 - RNA, 19 nt, Artificial Sequence
  Synthetic
cagagcugguggagcauau

SEQ ID NO: 4010 - RNA, 19 nt, Artificial Sequence
  Synthetic
gcacggagaagaugaagga

SEQ ID NO: 4011 - RNA, 19 nt, Artificial Sequence
  Synthetic
ggacggcuaaccaggguaa

SEQ ID NO: 4012 - RNA, 19 nt, Artificial Sequence
  Synthetic
acacgaagggccuguauuu

SEQ ID NO: 4013 - RNA, 19 nt, Artificial Sequence
  Synthetic
caaaauggaccgaggggaa

SEQ ID NO: 4014 - RNA, 19 nt, Artificial Sequence
  Synthetic
gcacuccacuagcaggaaa

SEQ ID NO: 4015 - RNA, 19 nt, Artificial Sequence
  Synthetic
cgcaggaagugguggguac

SEQ ID NO: 4016 - RNA, 19 nt, Artificial Sequence
  Synthetic
cugucaagaaggccaauua

SEQ ID NO: 4017 - RNA, 19 nt, Artificial Sequence
  Synthetic
gagcugccauucugaacua

SEQ ID NO: 4018 - RNA, 19 nt, Artificial Sequence
  Synthetic
gugaagagaagcugcccuu

SEQ ID NO: 4019 - RNA, 19 nt, Artificial Sequence
  Synthetic
ugaaugagacccagcuuga

SEQ ID NO: 4020 - RNA, 19 nt, Artificial Sequence
  Synthetic
ugcaaggaaauaacagaua

SEQ ID NO: 4021 - RNA, 19 nt, Artificial Sequence
  Synthetic
ucaaugaccuucaagcaga

SEQ ID NO: 4022 - RNA, 19 nt, Artificial Sequence
  Synthetic
caagagauuugauggauag

SEQ ID NO: 4023 - RNA, 19 nt, Artificial Sequence
  Synthetic
ugaggaaggugucccacua

SEQ ID NO: 4024 - RNA, 19 nt, Artificial Sequence
  Synthetic
agaucgugcugguugguca

SEQ ID NO: 4025 - RNA, 19 nt, Artificial Sequence
  Synthetic
ccaccaaggaucacgucuu

SEQ ID NO: 4026 - RNA, 19 nt, Artificial Sequence
  Synthetic
gcaaggaaauaacagauac

SEQ ID NO: 4027 - RNA, 19 nt, Artificial Sequence
  Synthetic
uagugaagauggagaaaua

SEQ ID NO: 4028 - RNA, 19 nt, Artificial Sequence
  Synthetic
gagaauaaccauuguaaca

SEQ ID NO: 4029 - RNA, 19 nt, Artificial Sequence
  Synthetic
ugacuaagcaagugaacaa

SEQ ID NO: 4030 - RNA, 19 nt, Artificial Sequence
  Synthetic
gagaauaaccguuguaaca

SEQ ID NO: 4031 - RNA, 19 nt, Artificial Sequence
  Synthetic
agucuguauuagugggaaa

SEQ ID NO: 4032 - RNA, 19 nt, Artificial Sequence
  Synthetic
gaaacuugaaagagagaau

SEQ ID NO: 4033 - RNA, 19 nt, Artificial Sequence
  Synthetic
aaucaaagaucuucugcaa

SEQ ID NO: 4034 - RNA, 19 nt, Artificial Sequence
  Synthetic
gucagaaacuugaaagaga

SEQ ID NO: 4035 - RNA, 19 nt, Artificial Sequence
  Synthetic
gaagauggcuggaagagau

SEQ ID NO: 4036 - RNA, 19 nt, Artificial Sequence
  Synthetic
cauucuuauuagaggagua

SEQ ID NO: 4037 - RNA, 19 nt, Artificial Sequence
  Synthetic
cgaaggagcaguacggaga

SEQ ID NO: 4038 - RNA, 19 nt, Artificial Sequence
  Synthetic
guacuuugcacuucagaaa

SEQ ID NO: 4039 - RNA, 19 nt, Artificial Sequence
  Synthetic
ggauggaguuggauuaaga

SEQ ID NO: 4040 - RNA, 19 nt, Artificial Sequence
  Synthetic
ggaguuggauuaagacaga

SEQ ID NO: 4041 - RNA, 19 nt, Artificial Sequence
  Synthetic
cuuaaauagugaagaugga

SEQ ID NO: 4042 - RNA, 19 nt, Artificial Sequence
  Synthetic
gguucaauuauguggucaa

SEQ ID NO: 4043 - RNA, 19 nt, Artificial Sequence
  Synthetic
ccuggauggaguuggauua

SEQ ID NO: 4044 - RNA, 19 nt, Artificial Sequence
  Synthetic
cugcaagaccuaagcucua

SEQ ID NO: 4045 - RNA, 19 nt, Artificial Sequence
  Synthetic
caagauauccgaagguuca

SEQ ID NO: 4046 - RNA, 19 nt, Artificial Sequence
  Synthetic
gugaagauggagaaauauu

SEQ ID NO: 4047 - RNA, 19 nt, Artificial Sequence
  Synthetic
aaauagugaagauggagaa

SEQ ID NO: 4048 - RNA, 19 nt, Artificial Sequence
  Synthetic
gcguggcacagaagaauua

SEQ ID NO: 4049 - RNA, 19 nt, Artificial Sequence
  Synthetic
gagagaauaaccauuguaa

SEQ ID NO: 4050 - RNA, 19 nt, Artificial Sequence
  Synthetic
ggaagaagcuuugucagua

SEQ ID NO: 4051 - RNA, 19 nt, Artificial Sequence
  Synthetic
ucaauaaugaagagcauga

SEQ ID NO: 4052 - RNA, 19 nt, Artificial Sequence
  Synthetic
ggucaggacuggagaucuc

SEQ ID NO: 4053 - RNA, 19 nt, Artificial Sequence
  Synthetic
uggauuugccgauuagaaa

SEQ ID NO: 4054 - RNA, 19 nt, Artificial Sequence
  Synthetic
gaauggaaguugauguacu

SEQ ID NO: 4055 - RNA, 19 nt, Artificial Sequence
  Synthetic
gcuauugcaccuugggaga

SEQ ID NO: 4056 - RNA, 19 nt, Artificial Sequence
  Synthetic
ggucauauugaauggaagu

SEQ ID NO: 4057 - RNA, 19 nt, Artificial Sequence
  Synthetic
ggaacgagggcgaggaaca

SEQ ID NO: 4058 - RNA, 19 nt, Artificial Sequence
  Synthetic
cccugaagguuguggguuu

SEQ ID NO: 4059 - RNA, 19 nt, Artificial Sequence
  Synthetic
caucaugcugugugacaaa

SEQ ID NO: 4060 - RNA, 19 nt, Artificial Sequence
  Synthetic
gaagagacauuuaguucau

SEQ ID NO: 4061 - RNA, 19 nt, Artificial Sequence
  Synthetic
gcaacgaagacaaggagga

SEQ ID NO: 4062 - RNA, 19 nt, Artificial Sequence
  Synthetic
acgaagacaaggaggaguu

SEQ ID NO: 4063 - RNA, 19 nt, Artificial Sequence
  Synthetic
augaaaaggaaguggucaa

SEQ ID NO: 4064 - RNA, 19 nt, Artificial Sequence
  Synthetic
aagcaagacccuauaucaa

SEQ ID NO: 4065 - RNA, 19 nt, Artificial Sequence
  Synthetic
ccugaagguuguggguuua

SEQ ID NO: 4066 - RNA, 19 nt, Artificial Sequence
  Synthetic
gagcagggcuucagaggcu

SEQ ID NO: 4067 - RNA, 19 nt, Artificial Sequence
  Synthetic
ucacugagaaugaugcuaa

SEQ ID NO: 4068 - RNA, 19 nt, Artificial Sequence
  Synthetic
gguuguggguuuacuggaa

SEQ ID NO: 4069 - RNA, 19 nt, Artificial Sequence
  Synthetic
gugaaaccgucuccacaaa

SEQ ID NO: 4070 - RNA, 19 nt, Artificial Sequence
  Synthetic
ugagaaagcaagacccuau

SEQ ID NO: 4071 - RNA, 19 nt, Artificial Sequence
  Synthetic
gccagaagccagaggauac

SEQ ID NO: 4072 - RNA, 19 nt, Artificial Sequence
  Synthetic
ggaagagacauuuaguuca

SEQ ID NO: 4073 - RNA, 19 nt, Artificial Sequence
  Synthetic
gaaaccgucuccacaaaua

SEQ ID NO: 4074 - RNA, 19 nt, Artificial Sequence
  Synthetic
gcagaugacgcaugaagca

SEQ ID NO: 4075 - RNA, 19 nt, Artificial Sequence
  Synthetic
ggucaaguucucagccuca

SEQ ID NO: 4076 - RNA, 19 nt, Artificial Sequence
  Synthetic
ggagaagagaggagucaug

SEQ ID NO: 4077 - RNA, 19 nt, Artificial Sequence
  Synthetic
ccccaaaucuggccauaaa

SEQ ID NO: 4078 - RNA, 19 nt, Artificial Sequence
  Synthetic
cgacugccucccagaacaa

SEQ ID NO: 4079 - RNA, 19 nt, Artificial Sequence
  Synthetic
aggaagagacauuuaguuc

SEQ ID NO: 4080 - RNA, 19 nt, Artificial Sequence
  Synthetic
ugacaaaccaggcuguuca

SEQ ID NO: 4081 - RNA, 19 nt, Artificial Sequence
  Synthetic
gagaaagcaagacccuaua

SEQ ID NO: 4082 - RNA, 19 nt, Artificial Sequence
  Synthetic
cuggcuugcugucaauaaa

SEQ ID NO: 4083 - RNA, 19 nt, Artificial Sequence
  Synthetic
ggauguguaugaaaaggaa

SEQ ID NO: 4084 - RNA, 19 nt, Artificial Sequence
  Synthetic
cagcacaccuuccaugaau

SEQ ID NO: 4085 - RNA, 19 nt, Artificial Sequence
  Synthetic
aaaaggaaguggucaaguu

SEQ ID NO: 4086 - RNA, 19 nt, Artificial Sequence
  Synthetic
aaccaggauuuauaagaga

SEQ ID NO: 4087 - RNA, 19 nt, Artificial Sequence
  Synthetic
ccagacuguucuagauaaa

SEQ ID NO: 4088 - RNA, 19 nt, Artificial Sequence
  Synthetic
gaaaguggauggugcaaca

SEQ ID NO: 4089 - RNA, 19 nt, Artificial Sequence
  Synthetic
gcugggugguggaggaaaa

SEQ ID NO: 4090 - RNA, 19 nt, Artificial Sequence
  Synthetic
gccaagaaggccuccgaaa

SEQ ID NO: 4091 - RNA, 19 nt, Artificial Sequence
  Synthetic
gcuggauaguggcaggauu

SEQ ID NO: 4092 - RNA, 19 nt, Artificial Sequence
  Synthetic
gugaccaacuccaguguga

SEQ ID NO: 4093 - RNA, 19 nt, Artificial Sequence
  Synthetic
guacagacuccucguccaa

SEQ ID NO: 4094 - RNA, 19 nt, Artificial Sequence
  Synthetic
ucuuggaccuagaggagga

SEQ ID NO: 4095 - RNA, 19 nt, Artificial Sequence
  Synthetic
gauaguggcaggauugaga

SEQ ID NO: 4096 - RNA, 19 nt, Artificial Sequence
  Synthetic
caagaaggccuccgaaagu

SEQ ID NO: 4097 - RNA, 19 nt, Artificial Sequence
  Synthetic
accuagaggaggagggucu

SEQ ID NO: 4098 - RNA, 19 nt, Artificial Sequence
  Synthetic
caaccagacuguucuagau

SEQ ID NO: 4099 - RNA, 19 nt, Artificial Sequence
  Synthetic
ccaagaaggccuccgaaag

SEQ ID NO: 4100 - RNA, 19 nt, Artificial Sequence
  Synthetic
caagaugggcguccgcuuu

SEQ ID NO: 4101 - RNA, 19 nt, Artificial Sequence
  Synthetic
guucugggcuggccacuau

SEQ ID NO: 4102 - RNA, 19 nt, Artificial Sequence
  Synthetic
guggcaggauugagauuug

SEQ ID NO: 4103 - RNA, 19 nt, Artificial Sequence
  Synthetic
aaccagacuguucuagaua

SEQ ID NO: 4104 - RNA, 19 nt, Artificial Sequence
  Synthetic
agacgugcuucgugacuuc

SEQ ID NO: 4105 - RNA, 19 nt, Artificial Sequence
  Synthetic
accagacuguucuagauaa

SEQ ID NO: 4106 - RNA, 19 nt, Artificial Sequence
  Synthetic
ucauucagcugguguugca

SEQ ID NO: 4107 - RNA, 19 nt, Artificial Sequence
  Synthetic
ccaaccagacuguucuaga

SEQ ID NO: 4108 - RNA, 19 nt, Artificial Sequence
  Synthetic
cagcugguguugcaagaag

SEQ ID NO: 4109 - RNA, 19 nt, Artificial Sequence
  Synthetic
ucacccacguguucuccaa

SEQ ID NO: 4110 - RNA, 19 nt, Artificial Sequence
  Synthetic
gaccaacuccagugugauc

SEQ ID NO: 4111 - RNA, 19 nt, Artificial Sequence
  Synthetic
caucggacgcaaccuuauu

SEQ ID NO: 4112 - RNA, 19 nt, Artificial Sequence
  Synthetic
caacaaugccugccuucac

SEQ ID NO: 4113 - RNA, 19 nt, Artificial Sequence
  Synthetic
cagacgugcuucgugacuu

SEQ ID NO: 4114 - RNA, 19 nt, Artificial Sequence
  Synthetic
cccaucggacgcaaccuua

SEQ ID NO: 4115 - RNA, 19 nt, Artificial Sequence
  Synthetic
gcaggauugagauuugugu

SEQ ID NO: 4116 - RNA, 19 nt, Artificial Sequence
  Synthetic
aagaaggccuccgaaagug

SEQ ID NO: 4117 - RNA, 19 nt, Artificial Sequence
  Synthetic
guaaagaucuggaggauuu

SEQ ID NO: 4118 - RNA, 19 nt, Artificial Sequence
  Synthetic
agacuagacuggagugcaa

SEQ ID NO: 4119 - RNA, 19 nt, Artificial Sequence
  Synthetic
ugauagaacuacaaagaga

SEQ ID NO: 4120 - RNA, 19 nt, Artificial Sequence
  Synthetic
gcacaaagauucacaccau

SEQ ID NO: 4121 - RNA, 19 nt, Artificial Sequence
  Synthetic
acacauagacgaugcacaa

SEQ ID NO: 4122 - RNA, 19 nt, Artificial Sequence
  Synthetic
cggcgaauauggacgacua

SEQ ID NO: 4123 - RNA, 19 nt, Artificial Sequence
  Synthetic
caacaguucuaaacagcaa

SEQ ID NO: 4124 - RNA, 19 nt, Artificial Sequence
  Synthetic
uaaagauaacggaguguaa

SEQ ID NO: 4125 - RNA, 19 nt, Artificial Sequence
  Synthetic
gcucagaugcacaaagauu

SEQ ID NO: 4126 - RNA, 19 nt, Artificial Sequence
  Synthetic
ccuaauauaccuucagaau

SEQ ID NO: 4127 - RNA, 19 nt, Artificial Sequence
  Synthetic
ccgcagagccuguuucuaa

SEQ ID NO: 4128 - RNA, 19 nt, Artificial Sequence
  Synthetic
gaagcaagauccuggugua

SEQ ID NO: 4129 - RNA, 19 nt, Artificial Sequence
  Synthetic
ggagcuggauggugaaaca

SEQ ID NO: 4130 - RNA, 19 nt, Artificial Sequence
  Synthetic
gucauuagacccagaauua

SEQ ID NO: 4131 - RNA, 19 nt, Artificial Sequence
  Synthetic
ccauacaggccaaauuaua

SEQ ID NO: 4132 - RNA, 19 nt, Artificial Sequence
  Synthetic
gauaugugauacaaagcaa

SEQ ID NO: 4133 - RNA, 19 nt, Artificial Sequence
  Synthetic
ggacuugcuuucugcuuua

SEQ ID NO: 4134 - RNA, 19 nt, Artificial Sequence
  Synthetic
gaggauggguuucuuaaua

SEQ ID NO: 4135 - RNA, 19 nt, Artificial Sequence
  Synthetic
gauagaacuacaaagagaa

SEQ ID NO: 4136 - RNA, 19 nt, Artificial Sequence
  Synthetic
guacgaaggccacaaagaa

SEQ ID NO: 4137 - RNA, 19 nt, Artificial Sequence
  Synthetic
cgaccugaaugaaaugaau

SEQ ID NO: 4138 - RNA, 19 nt, Artificial Sequence
  Synthetic
gcacaaggauagagagaaa

SEQ ID NO: 4139 - RNA, 19 nt, Artificial Sequence
  Synthetic
gugaauuuguugagagaaa

SEQ ID NO: 4140 - RNA, 19 nt, Artificial Sequence
  Synthetic
gggaugaucucaagaaaua

SEQ ID NO: 4141 - RNA, 19 nt, Artificial Sequence
  Synthetic
ggaaauggguccugaugaa

SEQ ID NO: 4142 - RNA, 19 nt, Artificial Sequence
  Synthetic
caggauacauggaaggaua

SEQ ID NO: 4143 - RNA, 19 nt, Artificial Sequence
  Synthetic
ccagagaacccuagagauu

SEQ ID NO: 4144 - RNA, 19 nt, Artificial Sequence
  Synthetic
gaagauacauugaccauua

SEQ ID NO: 4145 - RNA, 19 nt, Artificial Sequence
  Synthetic
gcuaagaccuugacuuuaa

SEQ ID NO: 4146 - RNA, 19 nt, Artificial Sequence
  Synthetic
gagaaauggacaaguaaau

SEQ ID NO: 4147 - RNA, 19 nt, Artificial Sequence
  Synthetic
uggaguaguuggugaauuu

SEQ ID NO: 4148 - RNA, 19 nt, Artificial Sequence
  Synthetic
gcucaaacuuccaauuuaa

SEQ ID NO: 4149 - RNA, 19 nt, Artificial Sequence
  Synthetic
augaagagauggaagaaga

SEQ ID NO: 4150 - RNA, 19 nt, Artificial Sequence
  Synthetic
gcauauagcaggaaaacua

SEQ ID NO: 4151 - RNA, 19 nt, Artificial Sequence
  Synthetic
guuagugguuccuggguua

SEQ ID NO: 4152 - RNA, 19 nt, Artificial Sequence
  Synthetic
uaacaaaugcuaaggguga

SEQ ID NO: 4153 - RNA, 19 nt, Artificial Sequence
  Synthetic
gauucuaggcuguuaaaua

SEQ ID NO: 4154 - RNA, 19 nt, Artificial Sequence
  Synthetic
ugagagaaauggacaagua

SEQ ID NO: 4155 - RNA, 19 nt, Artificial Sequence
  Synthetic
aagaaucaguguuggaaau

SEQ ID NO: 4156 - RNA, 19 nt, Artificial Sequence
  Synthetic
ggaagaaguucaaggaccu

SEQ ID NO: 4157 - RNA, 19 nt, Artificial Sequence
  Synthetic
ccaaauggcucgaaaucca

SEQ ID NO: 4158 - RNA, 19 nt, Artificial Sequence
  Synthetic
agagggugcucgagaggaa

SEQ ID NO: 4159 - RNA, 19 nt, Artificial Sequence
  Synthetic
aggagucaguggaagaaua

SEQ ID NO: 4160 - RNA, 19 nt, Artificial Sequence
  Synthetic
ccacauuagaccaguagaa

SEQ ID NO: 4161 - RNA, 19 nt, Artificial Sequence
  Synthetic
gagaccaaauuuucagaua

SEQ ID NO: 4162 - RNA, 19 nt, Artificial Sequence
  Synthetic
cuaccaauguccagaccaa

SEQ ID NO: 4163 - RNA, 19 nt, Artificial Sequence
  Synthetic
ggagaauaacaaaugcuaa

SEQ ID NO: 4164 - RNA, 19 nt, Artificial Sequence
  Synthetic
cauuagaccaguagaauca

SEQ ID NO: 4165 - RNA, 19 nt, Artificial Sequence
  Synthetic
acagagaacuaauugacua

SEQ ID NO: 4166 - RNA, 19 nt, Artificial Sequence
  Synthetic
ggguuaacacugcagauaa

SEQ ID NO: 4167 - RNA, 19 nt, Artificial Sequence
  Synthetic
uggccuaaauguagauuau

SEQ ID NO: 4168 - RNA, 19 nt, Artificial Sequence
  Synthetic
gcaaagggcuugacuauua

SEQ ID NO: 4169 - RNA, 19 nt, Artificial Sequence
  Synthetic
ggaaguauccagaaggaaa

SEQ ID NO: 4170 - RNA, 19 nt, Artificial Sequence
  Synthetic
cagcaaaaugcgagagaaa

SEQ ID NO: 4171 - RNA, 19 nt, Artificial Sequence
  Synthetic
gagaaagcuuagaggauca

SEQ ID NO: 4172 - RNA, 19 nt, Artificial Sequence
  Synthetic
agauaaagcaguagauaca

SEQ ID NO: 4173 - RNA, 19 nt, Artificial Sequence
  Synthetic
ggucuaaaccaaaggaaga

SEQ ID NO: 4174 - RNA, 19 nt, Artificial Sequence
  Synthetic
gaucaagguauaauggaaa

SEQ ID NO: 4175 - RNA, 19 nt, Artificial Sequence
  Synthetic
ugaugaaggugaaggugaa

SEQ ID NO: 4176 - RNA, 19 nt, Artificial Sequence
  Synthetic
gagagaaagcuuagaggau

SEQ ID NO: 4177 - RNA, 19 nt, Artificial Sequence
  Synthetic
gagcaaagauuauacauga

SEQ ID NO: 4178 - RNA, 19 nt, Artificial Sequence
  Synthetic
gcacaaaugaucucuaaua

SEQ ID NO: 4179 - RNA, 19 nt, Artificial Sequence
  Synthetic
gaaauaaaguugcugaaca

SEQ ID NO: 4180 - RNA, 19 nt, Artificial Sequence
  Synthetic
auccaaaccuagagaacaa

SEQ ID NO: 4181 - RNA, 19 nt, Artificial Sequence
  Synthetic
cugaaauggugacagauua

SEQ ID NO: 4182 - RNA, 19 nt, Artificial Sequence
  Synthetic
ggaggaaauaggagcagua

SEQ ID NO: 4183 - RNA, 19 nt, Artificial Sequence
  Synthetic
ggaaauucaucauggcaga

SEQ ID NO: 4184 - RNA, 19 nt, Artificial Sequence
  Synthetic
uuguaaagcugaugagcau

SEQ ID NO: 4185 - RNA, 19 nt, Artificial Sequence
  Synthetic
ggugaauuguguuggaaaa

SEQ ID NO: 4186 - RNA, 19 nt, Artificial Sequence
  Synthetic
gaaacuguguguugggauu

SEQ ID NO: 4187 - RNA, 19 nt, Artificial Sequence
  Synthetic
uaggauagcacaagcauua

SEQ ID NO: 4188 - RNA, 19 nt, Artificial Sequence
  Synthetic
ugacauggaugaacagcaa

SEQ ID NO: 4189 - RNA, 19 nt, Artificial Sequence
  Synthetic
cagaaauaccacaugcuaa

SEQ ID NO: 4190 - RNA, 19 nt, Artificial Sequence
  Synthetic
ggacaguuauuuagaagga

SEQ ID NO: 4191 - RNA, 19 nt, Artificial Sequence
  Synthetic
uggcagaccacuugaagaa

SEQ ID NO: 4192 - RNA, 19 nt, Artificial Sequence
  Synthetic
agaaauaccacaugcuaau

SEQ ID NO: 4193 - RNA, 19 nt, Artificial Sequence
  Synthetic
aagcagagaugucgaugaa

SEQ ID NO: 4194 - RNA, 19 nt, Artificial Sequence
  Synthetic
gcagcacaacuuagggaaa

SEQ ID NO: 4195 - RNA, 19 nt, Artificial Sequence
  Synthetic
aaagcaagccugugaauau

SEQ ID NO: 4196 - RNA, 19 nt, Artificial Sequence
  Synthetic
ugagaguacuccacgauua

SEQ ID NO: 4197 - RNA, 19 nt, Artificial Sequence
  Synthetic
caacugugagauugaauaa

SEQ ID NO: 4198 - RNA, 19 nt, Artificial Sequence
  Synthetic
gcucgaaacuucagagaua

SEQ ID NO: 4199 - RNA, 19 nt, Artificial Sequence
  Synthetic
ggaaagagcaguauggaga

SEQ ID NO: 4200 - RNA, 19 nt, Artificial Sequence
  Synthetic
acaaggagguauacaauaa

SEQ ID NO: 4201 - RNA, 19 nt, Artificial Sequence
  Synthetic
cuaaagagcgccauggaua

SEQ ID NO: 4202 - RNA, 19 nt, Artificial Sequence
  Synthetic
ucacaaaggaaguacuaaa

SEQ ID NO: 4203 - RNA, 19 nt, Artificial Sequence
  Synthetic
ggaagaagauguauuucaa

SEQ ID NO: 4204 - RNA, 19 nt, Artificial Sequence
  Synthetic
gcaacaaggagguauacaa

SEQ ID NO: 4205 - RNA, 19 nt, Artificial Sequence
  Synthetic
gaaagaaggacaugcugaa

SEQ ID NO: 4206 - RNA, 19 nt, Artificial Sequence
  Synthetic
gggcagaacugggugaaga

SEQ ID NO: 4207 - RNA, 19 nt, Artificial Sequence
  Synthetic
uguuggagcugauagcaaa

SEQ ID NO: 4208 - RNA, 19 nt, Artificial Sequence
  Synthetic
aagaaggacaugcugaaua

SEQ ID NO: 4209 - RNA, 19 nt, Artificial Sequence
  Synthetic
cagcuggauuggaagaaga

SEQ ID NO: 4210 - RNA, 19 nt, Artificial Sequence
  Synthetic
ccaagaagagaaagaagga

SEQ ID NO: 4211 - RNA, 19 nt, Artificial Sequence
  Synthetic
ggaagaaacucugccagua

SEQ ID NO: 4212 - RNA, 19 nt, Artificial Sequence
  Synthetic
caacaaggagguauacaau

SEQ ID NO: 4213 - RNA, 19 nt, Artificial Sequence
  Synthetic
cacuagaauugguauggaa

SEQ ID NO: 4214 - RNA, 19 nt, Artificial Sequence
  Synthetic
agucugugcuggucgggaa

SEQ ID NO: 4215 - RNA, 19 nt, Artificial Sequence
  Synthetic
ccaaagagucggcaagucu

SEQ ID NO: 4216 - RNA, 19 nt, Artificial Sequence
  Synthetic
gauuggaagaagauguauu

SEQ ID NO: 4217 - RNA, 19 nt, Artificial Sequence
  Synthetic
ugaaaguccuugaagacca

SEQ ID NO: 4218 - RNA, 19 nt, Artificial Sequence
  Synthetic
aaagagcaguauggagaua

SEQ ID NO: 4219 - RNA, 19 nt, Artificial Sequence
  Synthetic
ccgauguuacccaaggaaa

SEQ ID NO: 4220 - RNA, 19 nt, Artificial Sequence
  Synthetic
gacaaagggcagcuggauu

SEQ ID NO: 4221 - RNA, 19 nt, Artificial Sequence
  Synthetic
gcagauccgcaaacgauua

SEQ ID NO: 4222 - RNA, 19 nt, Artificial Sequence
  Synthetic
ccaauaacccagagagcug

SEQ ID NO: 4223 - RNA, 19 nt, Artificial Sequence
  Synthetic
guucacaaaggaaguacua

SEQ ID NO: 4224 - RNA, 19 nt, Artificial Sequence
  Synthetic
acccaaggaaagagcagua

SEQ ID NO: 4225 - RNA, 19 nt, Artificial Sequence
  Synthetic
uaaagagcgccauggauau

SEQ ID NO: 4226 - RNA, 19 nt, Artificial Sequence
  Synthetic
gggaauuuaagaaugugaa

SEQ ID NO: 4227 - RNA, 19 nt, Artificial Sequence
  Synthetic
gguauacaauaaggagaau

SEQ ID NO: 4228 - RNA, 19 nt, Artificial Sequence
  Synthetic
aagcauugauuuugaccaa

SEQ ID NO: 4229 - RNA, 19 nt, Artificial Sequence
  Synthetic
auguagauccagugcauaa

SEQ ID NO: 4230 - RNA, 19 nt, Artificial Sequence
  Synthetic
uggaauuccucaugcgcaa

SEQ ID NO: 4231 - RNA, 19 nt, Artificial Sequence
  Synthetic
ccugaguaauaguaggcaa

SEQ ID NO: 4232 - RNA, 19 nt, Artificial Sequence
  Synthetic
gcuugaagucaccgaagaa

SEQ ID NO: 4233 - RNA, 19 nt, Artificial Sequence
  Synthetic
gagucuuaacugauagcaa

SEQ ID NO: 4234 - RNA, 19 nt, Artificial Sequence
  Synthetic
agguggacccugauggcaa

SEQ ID NO: 4235 - RNA, 19 nt, Artificial Sequence
  Synthetic
agucauggacaucgaauca

SEQ ID NO: 4236 - RNA, 19 nt, Artificial Sequence
  Synthetic
uaauaguaggcaacugaaa

SEQ ID NO: 4237 - RNA, 19 nt, Artificial Sequence
  Synthetic
ugcacaagucucuggacaa

SEQ ID NO: 4238 - RNA, 19 nt, Artificial Sequence
  Synthetic
aaugaagauccguugguuu

SEQ ID NO: 4239 - RNA, 19 nt, Artificial Sequence
  Synthetic
agagagaugcaaagcuuca

SEQ ID NO: 4240 - RNA, 19 nt, Artificial Sequence
  Synthetic
agcaacuguuugaagaaau

SEQ ID NO: 4241 - RNA, 19 nt, Artificial Sequence
  Synthetic
gcugagauggcaagagucu

SEQ ID NO: 4242 - RNA, 19 nt, Artificial Sequence
  Synthetic
uguuaaagauucugaaacc

SEQ ID NO: 4243 - RNA, 19 nt, Artificial Sequence
  Synthetic
ccacaaugcagcuaggaua

SEQ ID NO: 4244 - RNA, 19 nt, Artificial Sequence
  Synthetic
gcucaaaggauaccaaaua

SEQ ID NO: 4245 - RNA, 19 nt, Artificial Sequence
  Synthetic
cauagacagugcagaguua

SEQ ID NO: 4246 - RNA, 19 nt, Artificial Sequence
  Synthetic
gacugaagcugaagaggaa

SEQ ID NO: 4247 - RNA, 19 nt, Artificial Sequence
  Synthetic
gaugaaacaugcaaagcua

SEQ ID NO: 4248 - RNA, 19 nt, Artificial Sequence
  Synthetic
agucaucacucuagaagaa

SEQ ID NO: 4249 - RNA, 19 nt, Artificial Sequence
  Synthetic
caacagauaugauguggaa

SEQ ID NO: 4250 - RNA, 19 nt, Artificial Sequence
  Synthetic
ccggaagucagcagggaaa

SEQ ID NO: 4251 - RNA, 19 nt, Artificial Sequence
  Synthetic
cuaugaaagugcacguuaa

SEQ ID NO: 4252 - RNA, 19 nt, Artificial Sequence
  Synthetic
gagagcagcuugaauguua

SEQ ID NO: 4253 - RNA, 19 nt, Artificial Sequence
  Synthetic
augcaaagcuagccacaua

SEQ ID NO: 4254 - RNA, 19 nt, Artificial Sequence
  Synthetic
agaugaacucguuggguua

SEQ ID NO: 4255 - RNA, 19 nt, Artificial Sequence
  Synthetic
cccaggagcuugugaagaa

SEQ ID NO: 4256 - RNA, 19 nt, Artificial Sequence
  Synthetic
cgaaaugugggcagaguau

SEQ ID NO: 4257 - RNA, 19 nt, Artificial Sequence
  Synthetic
gcuacuaagagaaggaaaa

SEQ ID NO: 4258 - RNA, 19 nt, Artificial Sequence
  Synthetic
acagauaugauguggaaau

SEQ ID NO: 4259 - RNA, 19 nt, Artificial Sequence
  Synthetic
ccaccagggcgaagaagaa

SEQ ID NO: 4260 - RNA, 19 nt, Artificial Sequence
  Synthetic
aagaauagcaggacuuuua

SEQ ID NO: 4261 - RNA, 19 nt, Artificial Sequence
  Synthetic
gugaauagcacgauuaaaa

SEQ ID NO: 4262 - RNA, 19 nt, Artificial Sequence
  Synthetic
ugaauauuguccugugaaa

SEQ ID NO: 4263 - RNA, 19 nt, Artificial Sequence
  Synthetic
gauauugaugggagagcua

SEQ ID NO: 4264 - RNA, 19 nt, Artificial Sequence
  Synthetic
ugacagugcaucugaggaa

SEQ ID NO: 4265 - RNA, 19 nt, Artificial Sequence
  Synthetic
ccuggaaauaccaaggaaa

SEQ ID NO: 4266 - RNA, 19 nt, Artificial Sequence
  Synthetic
cugaagcugaagaggaaua

SEQ ID NO: 4267 - RNA, 19 nt, Artificial Sequence
  Synthetic
ccaaauguucugugcagua

SEQ ID NO: 4268 - RNA, 19 nt, Artificial Sequence
  Synthetic
ccgaaauccugaucaaaga

SEQ ID NO: 4269 - RNA, 19 nt, Artificial Sequence
  Synthetic
agaagaagcucuaaauagu

SEQ ID NO: 4270 - RNA, 19 nt, Artificial Sequence
  Synthetic
agguacagguggaaaggau

SEQ ID NO: 4271 - RNA, 19 nt, Artificial Sequence
  Synthetic
gggcgaagaagaaggacca

SEQ ID NO: 4272 - RNA, 19 nt, Artificial Sequence
  Synthetic
cuggaaauaccaaggaaaa

SEQ ID NO: 4273 - RNA, 19 nt, Artificial Sequence
  Synthetic
ccaagaacgugaaggagga

SEQ ID NO: 4274 - RNA, 19 nt, Artificial Sequence
  Synthetic
gcaccaagaacgugaagga

SEQ ID NO: 4275 - RNA, 19 nt, Artificial Sequence
  Synthetic
ccgggaauacaaaggagaa

SEQ ID NO: 4276 - RNA, 19 nt, Artificial Sequence
  Synthetic
ccaugaaggucaaggggca

SEQ ID NO: 4277 - RNA, 19 nt, Artificial Sequence
  Synthetic
agagauacgagaagggcga

SEQ ID NO: 4278 - RNA, 19 nt, Artificial Sequence
  Synthetic
gcgauagcuccaaggccaa

SEQ ID NO: 4279 - RNA, 19 nt, Artificial Sequence
  Synthetic
gcaccuacucacagaacca

SEQ ID NO: 4280 - RNA, 19 nt, Artificial Sequence
  Synthetic
ggaugaggccagugagggu

SEQ ID NO: 4281 - RNA, 19 nt, Artificial Sequence
  Synthetic
uuugaagcgcagagggaca

SEQ ID NO: 4282 - RNA, 19 nt, Artificial Sequence
  Synthetic
gcgugguagaugagugcau

SEQ ID NO: 4283 - RNA, 19 nt, Artificial Sequence
  Synthetic
uggucaagaucuucagcuu

SEQ ID NO: 4284 - RNA, 19 nt, Artificial Sequence
  Synthetic
acgugaaggaggagacugu

SEQ ID NO: 4285 - RNA, 19 nt, Artificial Sequence
  Synthetic
ccgcaagagauacgagaag

SEQ ID NO: 4286 - RNA, 19 nt, Artificial Sequence
  Synthetic
aggagugaguaucgaucaa

SEQ ID NO: 4287 - RNA, 19 nt, Artificial Sequence
  Synthetic
ucugauaaacugugggaac

SEQ ID NO: 4288 - RNA, 19 nt, Artificial Sequence
  Synthetic
cagaaaggaaagagauaga

SEQ ID NO: 4289 - RNA, 19 nt, Artificial Sequence
  Synthetic
ggaaugaaacuguaagaga

SEQ ID NO: 4290 - RNA, 19 nt, Artificial Sequence
  Synthetic
aaggaaagagauagagcaa

SEQ ID NO: 4291 - RNA, 19 nt, Artificial Sequence
  Synthetic
cgauugauguacagcuaua

SEQ ID NO: 4292 - RNA, 19 nt, Artificial Sequence
  Synthetic
gaaugaaacuguaagagau

SEQ ID NO: 4293 - RNA, 19 nt, Artificial Sequence
  Synthetic
gcacauuguucuuuucaaa

SEQ ID NO: 4294 - RNA, 19 nt, Artificial Sequence
  Synthetic
caugaaagcaguugcaauu

SEQ ID NO: 4295 - RNA, 19 nt, Artificial Sequence
  Synthetic
uugaagaaguggaaucuaa

SEQ ID NO: 4296 - RNA, 19 nt, Artificial Sequence
  Synthetic
agauuuggguugugugaau

SEQ ID NO: 4297 - RNA, 19 nt, Artificial Sequence
  Synthetic
ggaaagagauagagcaagg

SEQ ID NO: 4298 - RNA, 19 nt, Artificial Sequence
  Synthetic
guuugguacuagagcuaua

SEQ ID NO: 4299 - RNA, 19 nt, Artificial Sequence
  Synthetic
accagaaaggaaagagaua

SEQ ID NO: 4300 - RNA, 19 nt, Artificial Sequence
  Synthetic
gggccaugagcuaguauua

SEQ ID NO: 4301 - RNA, 19 nt, Artificial Sequence
  Synthetic
ggucacugauggugcauuu

SEQ ID NO: 4302 - RNA, 19 nt, Artificial Sequence
  Synthetic
gcaugaaagcaguugcaau

SEQ ID NO: 4303 - RNA, 19 nt, Artificial Sequence
  Synthetic
gaacugaaaccauuugaaa

SEQ ID NO: 4304 - RNA, 19 nt, Artificial Sequence
  Synthetic
ccucuuugguguugagcuu

SEQ ID NO: 4305 - RNA, 19 nt, Artificial Sequence
  Synthetic
cuugaugucuucagaggaa

SEQ ID NO: 4306 - RNA, 19 nt, Artificial Sequence
  Synthetic
ucaacuaccagaaaggaaa

SEQ ID NO: 4307 - RNA, 19 nt, Artificial Sequence
  Synthetic
gccaugagcuaguauuaua

SEQ ID NO: 4308 - RNA, 19 nt, Artificial Sequence
  Synthetic
agcuauaacugcuguguuu

SEQ ID NO: 4309 - RNA, 19 nt, Artificial Sequence
  Synthetic
guacuagagcuauacaaua

SEQ ID NO: 4310 - RNA, 19 nt, Artificial Sequence
  Synthetic
gugaauauuugcucaguca

SEQ ID NO: 4311 - RNA, 19 nt, Artificial Sequence
  Synthetic
gagcaagggaagagcauac

SEQ ID NO: 4312 - RNA, 19 nt, Artificial Sequence
  Synthetic
guagauuaguugagaacac

SEQ ID NO: 4313 - RNA, 19 nt, Artificial Sequence
  Synthetic
gggaaguacaaaucauuau

SEQ ID NO: 4314 - RNA, 19 nt, Artificial Sequence
  Synthetic
guugagaacacuauucaua

SEQ ID NO: 4315 - RNA, 19 nt, Artificial Sequence
  Synthetic
acacaaugaaggugaugau

SEQ ID NO: 4316 - RNA, 19 nt, Artificial Sequence
  Synthetic
auacaagugcaguuaacaa

SEQ ID NO: 4317 - RNA, 19 nt, Artificial Sequence
  Synthetic
gcuucuggcuuuauucaaa

SEQ ID NO: 4318 - RNA, 19 nt, Artificial Sequence
  Synthetic
gggagaugcugaaggaaau

SEQ ID NO: 4319 - RNA, 19 nt, Artificial Sequence
  Synthetic
ccucaaagccaguuguaaa

SEQ ID NO: 4320 - RNA, 19 nt, Artificial Sequence
  Synthetic
aauuauagccagaggaaau

SEQ ID NO: 4321 - RNA, 19 nt, Artificial Sequence
  Synthetic
ggauaguuguaaagaagaa

SEQ ID NO: 4322 - RNA, 19 nt, Artificial Sequence
  Synthetic
cgggagaugcugaaggaaa

SEQ ID NO: 4323 - RNA, 19 nt, Artificial Sequence
  Synthetic
ggaagaagauccuagaaga

SEQ ID NO: 4324 - RNA, 19 nt, Artificial Sequence
  Synthetic
ccuagaauguguagauauu

SEQ ID NO: 4325 - RNA, 19 nt, Artificial Sequence
  Synthetic
acgagaaggcuguggauuu

SEQ ID NO: 4326 - RNA, 19 nt, Artificial Sequence
  Synthetic
caguaaagcaauacaaaga

SEQ ID NO: 4327 - RNA, 19 nt, Artificial Sequence
  Synthetic
gguaaaaccugaugacauu

SEQ ID NO: 4328 - RNA, 19 nt, Artificial Sequence
  Synthetic
auacaaagaguuaccgaaa

SEQ ID NO: 4329 - RNA, 19 nt, Artificial Sequence
  Synthetic
gguacaaagaaaagcaaaa

SEQ ID NO: 4330 - RNA, 19 nt, Artificial Sequence
  Synthetic
gaagaagauccuagaagau

SEQ ID NO: 4331 - RNA, 19 nt, Artificial Sequence
  Synthetic
gaaauuauagccagaggaa

SEQ ID NO: 4332 - RNA, 19 nt, Artificial Sequence
  Synthetic
gaaggaaauuauagccaga

SEQ ID NO: 4333 - RNA, 19 nt, Artificial Sequence
  Synthetic
ggaaaaguagauagugaua

SEQ ID NO: 4334 - RNA, 19 nt, Artificial Sequence
  Synthetic
ccucagugaacaugaagaa

SEQ ID NO: 4335 - RNA, 19 nt, Artificial Sequence
  Synthetic
cuguaaagacugcauuaaa

SEQ ID NO: 4336 - RNA, 19 nt, Artificial Sequence
  Synthetic
aauacaaagcccagaccaa

SEQ ID NO: 4337 - RNA, 19 nt, Artificial Sequence
  Synthetic
caauugauaccaacagaaa

SEQ ID NO: 4338 - RNA, 19 nt, Artificial Sequence
  Synthetic
agaagauccuagaagauga

SEQ ID NO: 4339 - RNA, 19 nt, Artificial Sequence
  Synthetic
caacagacacuuaauagua

SEQ ID NO: 4340 - RNA, 19 nt, Artificial Sequence
  Synthetic
gcagaauauaauuggcaga

SEQ ID NO: 4341 - RNA, 19 nt, Artificial Sequence
  Synthetic
ggauagacaaccucuuaaa

SEQ ID NO: 4342 - RNA, 19 nt, Artificial Sequence
  Synthetic
ccaguagacuuuaugaaga

SEQ ID NO: 4343 - RNA, 19 nt, Artificial Sequence
  Synthetic
cauuccaguuguacaguaa

SEQ ID NO: 4344 - RNA, 19 nt, Artificial Sequence
  Synthetic
cuagagaccaguagacuuu

SEQ ID NO: 4345 - RNA, 19 nt, Artificial Sequence
  Synthetic
guuguacaguaaagcaaua

SEQ ID NO: 4346 - RNA, 19 nt, Artificial Sequence
  Synthetic
gugucuaaagugagcacaa

SEQ ID NO: 4347 - RNA, 19 nt, Artificial Sequence
  Synthetic
acgaaauccuaaaguagau

SEQ ID NO: 4348 - RNA, 19 nt, Artificial Sequence
  Synthetic
gaacaaugccacauggaca

SEQ ID NO: 4349 - RNA, 19 nt, Artificial Sequence
  Synthetic
ggccggacaucgugguuaa

SEQ ID NO: 4350 - RNA, 19 nt, Artificial Sequence
  Synthetic
ccucaugacccucuggaaa

SEQ ID NO: 4351 - RNA, 19 nt, Artificial Sequence
  Synthetic
gcuggaagguggagagccu

SEQ ID NO: 4352 - RNA, 19 nt, Artificial Sequence
  Synthetic
ccaaagucaagaaguauuu

SEQ ID NO: 4353 - RNA, 19 nt, Artificial Sequence
  Synthetic
gagcuguuguccagauuuu

SEQ ID NO: 4354 - RNA, 19 nt, Artificial Sequence
  Synthetic
ggaggcugaugcagaagaa

SEQ ID NO: 4355 - RNA, 19 nt, Artificial Sequence
  Synthetic
gcagaagaauggcgugaac

SEQ ID NO: 4356 - RNA, 19 nt, Artificial Sequence
  Synthetic
caagaaguauuuugucaca

SEQ ID NO: 4357 - RNA, 19 nt, Artificial Sequence
  Synthetic
gcgcaacccgugugcugaa

SEQ ID NO: 4358 - RNA, 19 nt, Artificial Sequence
  Synthetic
ucgggaggcugaugcagaa

SEQ ID NO: 4359 - RNA, 19 nt, Artificial Sequence
  Synthetic
gaccgaggcagguggauca

SEQ ID NO: 4360 - RNA, 19 nt, Artificial Sequence
  Synthetic
ggaggagcuacuagacaca

SEQ ID NO: 4361 - RNA, 19 nt, Artificial Sequence
  Synthetic
cccaaagucaagaaguauu

SEQ ID NO: 4362 - RNA, 19 nt, Artificial Sequence
  Synthetic
gcgagacucuggcucauaa

SEQ ID NO: 4363 - RNA, 19 nt, Artificial Sequence
  Synthetic
ggacagaggucuccuacac

SEQ ID NO: 4364 - RNA, 19 nt, Artificial Sequence
  Synthetic
gugcugaagaggauauguu

SEQ ID NO: 4365 - RNA, 19 nt, Artificial Sequence
  Synthetic
aagcagcccuggacagcau

SEQ ID NO: 4366 - RNA, 19 nt, Artificial Sequence
  Synthetic
gagagggcuucaucaccaa

SEQ ID NO: 4367 - RNA, 19 nt, Artificial Sequence
  Synthetic
guacugggcaggcugguau

SEQ ID NO: 4368 - RNA, 19 nt, Artificial Sequence
  Synthetic
uuaacgagcugcccgagaa

SEQ ID NO: 4369 - RNA, 19 nt, Artificial Sequence
  Synthetic
gaagaggauauguuugcau

SEQ ID NO: 4370 - RNA, 19 nt, Artificial Sequence
  Synthetic
gacucuggcucauaaaaua

SEQ ID NO: 4371 - RNA, 19 nt, Artificial Sequence
  Synthetic
gcaccuaccaacucaaagu

SEQ ID NO: 4372 - RNA, 19 nt, Artificial Sequence
  Synthetic
ccuacaccuucucagacua

SEQ ID NO: 4373 - RNA, 19 nt, Artificial Sequence
  Synthetic
gggcagugaggucccugua

SEQ ID NO: 4374 - RNA, 19 nt, Artificial Sequence
  Synthetic
ggugaaacccugucucuac

SEQ ID NO: 4375 - RNA, 19 nt, Artificial Sequence
  Synthetic
cuacggagccugcauagga

SEQ ID NO: 4376 - RNA, 19 nt, Artificial Sequence
  Synthetic
gggaggcugaugcagaaga

SEQ ID NO: 4377 - RNA, 19 nt, Artificial Sequence
  Synthetic
ggagcccacgggacagauu

SEQ ID NO: 4378 - RNA, 19 nt, Artificial Sequence
  Synthetic
ggaaagaacuguacaggaa

SEQ ID NO: 4379 - RNA, 19 nt, Artificial Sequence
  Synthetic
ccagaaaccuuuuaagaga

SEQ ID NO: 4380 - RNA, 19 nt, Artificial Sequence
  Synthetic
gugcugaucucgaguguua

SEQ ID NO: 4381 - RNA, 19 nt, Artificial Sequence
  Synthetic
gaauaugaccaaagaccaa

SEQ ID NO: 4382 - RNA, 19 nt, Artificial Sequence
  Synthetic
aggaagaggcacauacaaa

SEQ ID NO: 4383 - RNA, 19 nt, Artificial Sequence
  Synthetic
ugagauuagaagugugaaa

SEQ ID NO: 4384 - RNA, 19 nt, Artificial Sequence
  Synthetic
acaaagaucuucagaaacu

SEQ ID NO: 4385 - RNA, 19 nt, Artificial Sequence
  Synthetic
ccggagaaguggaaguuga

SEQ ID NO: 4386 - RNA, 19 nt, Artificial Sequence
  Synthetic
gcgugauuuucgagacaau

SEQ ID NO: 4387 - RNA, 19 nt, Artificial Sequence
  Synthetic
ccugugugccuuugggaaa

SEQ ID NO: 4388 - RNA, 19 nt, Artificial Sequence
  Synthetic
gcacauacaaagaaaagaa

SEQ ID NO: 4389 - RNA, 19 nt, Artificial Sequence
  Synthetic
acuccagaauaaugagcaa

SEQ ID NO: 4390 - RNA, 19 nt, Artificial Sequence
  Synthetic
cauuagagaccuuguauca

SEQ ID NO: 4391 - RNA, 19 nt, Artificial Sequence
  Synthetic
ccuugauaguguugauaca

SEQ ID NO: 4392 - RNA, 19 nt, Artificial Sequence
  Synthetic
ccgaaagggcgguuuguga

SEQ ID NO: 4393 - RNA, 19 nt, Artificial Sequence
  Synthetic
agacuagcauacaggauga

SEQ ID NO: 4394 - RNA, 19 nt, Artificial Sequence
  Synthetic
uagcauacaggaugaacaa

SEQ ID NO: 4395 - RNA, 19 nt, Artificial Sequence
  Synthetic
gaaaccugauuguuguaaa

SEQ ID NO: 4396 - RNA, 19 nt, Artificial Sequence
  Synthetic
caaagagaaacuaggggaa

SEQ ID NO: 4397 - RNA, 19 nt, Artificial Sequence
  Synthetic
gaaccuaccagauguauuu

SEQ ID NO: 4398 - RNA, 19 nt, Artificial Sequence
  Synthetic
aaagaacuguacaggaaga

SEQ ID NO: 4399 - RNA, 19 nt, Artificial Sequence
  Synthetic
cugagucaauucaagauaa

SEQ ID NO: 4400 - RNA, 19 nt, Artificial Sequence
  Synthetic
gugaaucgguggaagggca

SEQ ID NO: 4401 - RNA, 19 nt, Artificial Sequence
  Synthetic
cuguacaggaagaggcaca

SEQ ID NO: 4402 - RNA, 19 nt, Artificial Sequence
  Synthetic
agaggcacauacaaagaaa

SEQ ID NO: 4403 - RNA, 19 nt, Artificial Sequence
  Synthetic
ccacagauucagagcauuc

SEQ ID NO: 4404 - RNA, 19 nt, Artificial Sequence
  Synthetic
gaaugacgacaguauguua

SEQ ID NO: 4405 - RNA, 19 nt, Artificial Sequence
  Synthetic
gaugaacaaccaagugauu

SEQ ID NO: 4406 - RNA, 19 nt, Artificial Sequence
  Synthetic
agacacagauuggaaagaa

SEQ ID NO: 4407 - RNA, 19 nt, Artificial Sequence
  Synthetic
ggguguauaagcugcagua

SEQ ID NO: 4408 - RNA, 19 nt, Artificial Sequence
  Synthetic
cgaaagaacaggaaggauu

SEQ ID NO: 4409 - RNA, 19 nt, Artificial Sequence
  Synthetic
ccaaaugcacugagagaau

SEQ ID NO: 4410 - RNA, 19 nt, Artificial Sequence
  Synthetic
ggagaauggcugcgagcaa

SEQ ID NO: 4411 - RNA, 19 nt, Artificial Sequence
  Synthetic
ggagagaugucuuggauga

SEQ ID NO: 4412 - RNA, 19 nt, Artificial Sequence
  Synthetic
uggcaaggguugugcaaau

SEQ ID NO: 4413 - RNA, 19 nt, Artificial Sequence
  Synthetic
ccaaggaggcauugacaua

SEQ ID NO: 4414 - RNA, 19 nt, Artificial Sequence
  Synthetic
ugaagagcguggagaguau

SEQ ID NO: 4415 - RNA, 19 nt, Artificial Sequence
  Synthetic
gaaaucaguucuugccaaa

SEQ ID NO: 4416 - RNA, 19 nt, Artificial Sequence
  Synthetic
cagaugagggagugaacua

SEQ ID NO: 4417 - RNA, 19 nt, Artificial Sequence
  Synthetic
gcaaggaaaucgaaagaac

SEQ ID NO: 4418 - RNA, 19 nt, Artificial Sequence
  Synthetic
cgccaaaggaaauagcaaa

SEQ ID NO: 4419 - RNA, 19 nt, Artificial Sequence
  Synthetic
gaugauucgccaaaggaaa

SEQ ID NO: 4420 - RNA, 19 nt, Artificial Sequence
  Synthetic
gaacccaccuuuaggauuu

SEQ ID NO: 4421 - RNA, 19 nt, Artificial Sequence
  Synthetic
gcuguuaacgaaugauaaa

SEQ ID NO: 4422 - RNA, 19 nt, Artificial Sequence
  Synthetic
aagcagagccacugucuaa

SEQ ID NO: 4423 - RNA, 19 nt, Artificial Sequence
  Synthetic
gcauuagauuugccugaaa

SEQ ID NO: 4424 - RNA, 19 nt, Artificial Sequence
  Synthetic
gaagaguguugauuuguua

SEQ ID NO: 4425 - RNA, 19 nt, Artificial Sequence
  Synthetic
gagaaucuaucuugaugaa

SEQ ID NO: 4426 - RNA, 19 nt, Artificial Sequence
  Synthetic
uguggagaguggucagaaa

SEQ ID NO: 4427 - RNA, 19 nt, Artificial Sequence
  Synthetic
ggucaaggguuguggagag

SEQ ID NO: 4428 - RNA, 19 nt, Artificial Sequence
  Synthetic
ggacaaguaaaguuugaau

SEQ ID NO: 4429 - RNA, 19 nt, Artificial Sequence
  Synthetic
aggcaaggaaaucgaaaga

SEQ ID NO: 4430 - RNA, 19 nt, Artificial Sequence
  Synthetic
caccaaucaucguaaacaa

SEQ ID NO: 4431 - RNA, 19 nt, Artificial Sequence
  Synthetic
caauaagaacccaccuuua

SEQ ID NO: 4432 - RNA, 19 nt, Artificial Sequence
  Synthetic
gcccucaugugaagaauaa

SEQ ID NO: 4433 - RNA, 19 nt, Artificial Sequence
  Synthetic
gguaaguccuuuaaaccau

SEQ ID NO: 4434 - RNA, 19 nt, Artificial Sequence
  Synthetic
ugauuuaaugcgagaacuu

SEQ ID NO: 4435 - RNA, 19 nt, Artificial Sequence
  Synthetic
ccaaggacuuagcagauau

SEQ ID NO: 4436 - RNA, 19 nt, Artificial Sequence
  Synthetic
caaggaaaucgaaagaaca

SEQ ID NO: 4437 - RNA, 19 nt, Artificial Sequence
  Synthetic
ggaccuugcgaaugaugaa

SEQ ID NO: 4438 - RNA, 19 nt, Artificial Sequence
  Synthetic
cguuuaagaacuaggaaua

SEQ ID NO: 4439 - RNA, 19 nt, Artificial Sequence
  Synthetic
gggcagaagcuguauuaaa

SEQ ID NO: 4440 - RNA, 19 nt, Artificial Sequence
  Synthetic
gguguaagcucuagcaauu

SEQ ID NO: 4441 - RNA, 19 nt, Artificial Sequence
  Synthetic
aaccauaguuagagacaaa

SEQ ID NO: 4442 - RNA, 19 nt, Artificial Sequence
  Synthetic
cggcagauaccaaaggaaa

SEQ ID NO: 4443 - RNA, 19 nt, Artificial Sequence
  Synthetic
ccuaaaagcaguagaagaa

SEQ ID NO: 4444 - RNA, 19 nt, Artificial Sequence
  Synthetic
agucagugcuuuugagauu

SEQ ID NO: 4445 - RNA, 19 nt, Artificial Sequence
  Synthetic
gcggagacuuuaagaauca

SEQ ID NO: 4446 - RNA, 19 nt, Artificial Sequence
  Synthetic
caacaaacucaucuggaua

SEQ ID NO: 4447 - RNA, 19 nt, Artificial Sequence
  Synthetic
caauggagguccugaugua

SEQ ID NO: 4448 - RNA, 19 nt, Artificial Sequence
  Synthetic
guauauagcgcaaaagaaa

SEQ ID NO: 4449 - RNA, 19 nt, Artificial Sequence
  Synthetic
cauguaaaccugagccuaa

SEQ ID NO: 4450 - RNA, 19 nt, Artificial Sequence
  Synthetic
gagccaagaucgugccauu

SEQ ID NO: 4451 - RNA, 19 nt, Artificial Sequence
  Synthetic
caaaagagcaccuaaguua

SEQ ID NO: 4452 - RNA, 19 nt, Artificial Sequence
  Synthetic
acagcuacauugaagauaa

SEQ ID NO: 4453 - RNA, 19 nt, Artificial Sequence
  Synthetic
gcaacuuguaccugauaua

SEQ ID NO: 4454 - RNA, 19 nt, Artificial Sequence
  Synthetic
ugaaaguccugcugaaaca

SEQ ID NO: 4455 - RNA, 19 nt, Artificial Sequence
  Synthetic
ugccagagacccugaaaua

SEQ ID NO: 4456 - RNA, 19 nt, Artificial Sequence
  Synthetic
gaaaacaagaacaggcaaa

SEQ ID NO: 4457 - RNA, 19 nt, Artificial Sequence
  Synthetic
gagcagaugaugaugaaga

SEQ ID NO: 4458 - RNA, 19 nt, Artificial Sequence
  Synthetic
aaacagaucugcaggcaca

SEQ ID NO: 4459 - RNA, 19 nt, Artificial Sequence
  Synthetic
caguagaagaagaacaaaa

SEQ ID NO: 4460 - RNA, 19 nt, Artificial Sequence
  Synthetic
gcagagacaggcaggagua

SEQ ID NO: 4461 - RNA, 19 nt, Artificial Sequence
  Synthetic
guggaauauuacagguaca

SEQ ID NO: 4462 - RNA, 19 nt, Artificial Sequence
  Synthetic
aaaugaaaguccugcugaa

SEQ ID NO: 4463 - RNA, 19 nt, Artificial Sequence
  Synthetic
acacagacaaucagaccaa

SEQ ID NO: 4464 - RNA, 19 nt, Artificial Sequence
  Synthetic
caaaucaacuggugagacu

SEQ ID NO: 4465 - RNA, 19 nt, Artificial Sequence
  Synthetic
gaagauugucauucugaua

SEQ ID NO: 4466 - RNA, 19 nt, Artificial Sequence
  Synthetic
ggugaaaugugcauacaga

SEQ ID NO: 4467 - RNA, 19 nt, Artificial Sequence
  Synthetic
uggcagaucucuuguccua

SEQ ID NO: 4468 - RNA, 19 nt, Artificial Sequence
  Synthetic
gcagauaaguaauggaaca

SEQ ID NO: 4469 - RNA, 19 nt, Artificial Sequence
  Synthetic
ccagauaaguaauggaaca

SEQ ID NO: 4470 - RNA, 19 nt, Artificial Sequence
  Synthetic
gaucaaggaaugucaauaa

SEQ ID NO: 4471 - RNA, 19 nt, Artificial Sequence
  Synthetic
caugauaaguaauggaaca

SEQ ID NO: 4472 - RNA, 19 nt, Artificial Sequence
  Synthetic
ccaguaaauugcuaaguaa

SEQ ID NO: 4473 - RNA, 19 nt, Artificial Sequence
  Synthetic
caauaaaccuccauucaua

SEQ ID NO: 4474 - RNA, 19 nt, Artificial Sequence
  Synthetic
gauauuugguagaguaaca

SEQ ID NO: 4475 - RNA, 19 nt, Artificial Sequence
  Synthetic
aaucagaucaaguggaauu

SEQ ID NO: 4476 - RNA, 19 nt, Artificial Sequence
  Synthetic
gaugauggccuuugaauau

SEQ ID NO: 4477 - RNA, 19 nt, Artificial Sequence
  Synthetic
cgucaauguaguagacuuu

SEQ ID NO: 4478 - RNA, 19 nt, Artificial Sequence
  Synthetic
ugucagaugucuccagaua

SEQ ID NO: 4479 - RNA, 19 nt, Artificial Sequence
  Synthetic
acucggugauugaggacaa

SEQ ID NO: 4480 - RNA, 19 nt, Artificial Sequence
  Synthetic
cagccuaacucuucaagua

SEQ ID NO: 4481 - RNA, 19 nt, Artificial Sequence
  Synthetic
ccugauauuugguagagua

SEQ ID NO: 4482 - RNA, 19 nt, Artificial Sequence
  Synthetic
guuaguggaucaucagaua

SEQ ID NO: 4483 - RNA, 19 nt, Artificial Sequence
  Synthetic
gaaggaaugcuuuggaaga

SEQ ID NO: 4484 - RNA, 19 nt, Artificial Sequence
  Synthetic
gauaaguaauggaacauca

SEQ ID NO: 4485 - RNA, 19 nt, Artificial Sequence
  Synthetic
gggugaaguucuuaacaca

SEQ ID NO: 4486 - RNA, 19 nt, Artificial Sequence
  Synthetic
uaguagacuuugacgacaa

SEQ ID NO: 4487 - RNA, 19 nt, Artificial Sequence
  Synthetic
accauuaggcucugggaua

SEQ ID NO: 4488 - RNA, 19 nt, Artificial Sequence
  Synthetic
gcucugaaguggagugaag

SEQ ID NO: 4489 - RNA, 19 nt, Artificial Sequence
  Synthetic
guaacuggcucuucagauu

SEQ ID NO: 4490 - RNA, 19 nt, Artificial Sequence
  Synthetic
guucugacuuucugggauu

SEQ ID NO: 4491 - RNA, 19 nt, Artificial Sequence
  Synthetic
caauagagagguaccuuaa

SEQ ID NO: 4492 - RNA, 19 nt, Artificial Sequence
  Synthetic
ccuagagggacaugaagaa

SEQ ID NO: 4493 - RNA, 19 nt, Artificial Sequence
  Synthetic
acacauugauccaccacaa

SEQ ID NO: 4494 - RNA, 19 nt, Artificial Sequence
  Synthetic
gcacauugguggaacauuc

SEQ ID NO: 4495 - RNA, 19 nt, Artificial Sequence
  Synthetic
ggacuuuauuaccgcuuua

SEQ ID NO: 4496 - RNA, 19 nt, Artificial Sequence
  Synthetic
gagaagacuuggccucuaa

SEQ ID NO: 4497 - RNA, 19 nt, Artificial Sequence
  Synthetic
caucaagacuccugagaua

SEQ ID NO: 4498 - RNA, 19 nt, Artificial Sequence
  Synthetic
ccucuuaagugcagacaaa

SEQ ID NO: 4499 - RNA, 19 nt, Artificial Sequence
  Synthetic
ggagagaaaucaacuguaa

SEQ ID NO: 4500 - RNA, 19 nt, Artificial Sequence
  Synthetic
ggaagaagguuuauuugaa

SEQ ID NO: 4501 - RNA, 19 nt, Artificial Sequence
  Synthetic
cggugaaguuugaugaaca

SEQ ID NO: 4502 - RNA, 19 nt, Artificial Sequence
  Synthetic
gagauuaagauuuggccaa

SEQ ID NO: 4503 - RNA, 19 nt, Artificial Sequence
  Synthetic
agacauggcuugauaacau

SEQ ID NO: 4504 - RNA, 19 nt, Artificial Sequence
  Synthetic
uggccaauugggagagaaa

SEQ ID NO: 4505 - RNA, 19 nt, Artificial Sequence
  Synthetic
ccaagguaguuuugcagaa

SEQ ID NO: 4506 - RNA, 19 nt, Artificial Sequence
  Synthetic
cugccagaguacaggaaau

SEQ ID NO: 4507 - RNA, 19 nt, Artificial Sequence
  Synthetic
ucuuaagugcagacaaaua

SEQ ID NO: 4508 - RNA, 19 nt, Artificial Sequence
  Synthetic
gucucuaaacaguggaaua

SEQ ID NO: 4509 - RNA, 19 nt, Artificial Sequence
  Synthetic
uuugaaaccucgucauuaa

SEQ ID NO: 4510 - RNA, 19 nt, Artificial Sequence
  Synthetic
cgguauuuagcguggacua

SEQ ID NO: 4511 - RNA, 19 nt, Artificial Sequence
  Synthetic
guacaggaaaucaaagaga

SEQ ID NO: 4512 - RNA, 19 nt, Artificial Sequence
  Synthetic
gaaaucacauugucuguua

SEQ ID NO: 4513 - RNA, 19 nt, Artificial Sequence
  Synthetic
gaaugaagcaacuggagga

SEQ ID NO: 4514 - RNA, 19 nt, Artificial Sequence
  Synthetic
ugaagcaacuggaggacca

SEQ ID NO: 4515 - RNA, 19 nt, Artificial Sequence
  Synthetic
ccagaguacaggaaaucaa

SEQ ID NO: 4516 - RNA, 19 nt, Artificial Sequence
  Synthetic
ucucuaaacaguggaauaa

SEQ ID NO: 4517 - RNA, 19 nt, Artificial Sequence
  Synthetic
cugcaaagcugugggaugu

SEQ ID NO: 4518 - RNA, 19 nt, Artificial Sequence
  Synthetic
aaacaguggaauaagguga

SEQ ID NO: 4519 - RNA, 19 nt, Artificial Sequence
  Synthetic
gcuaauugguugccuauga

SEQ ID NO: 4520 - RNA, 19 nt, Artificial Sequence
  Synthetic
ggugauaagugccuguaca

SEQ ID NO: 4521 - RNA, 19 nt, Artificial Sequence
  Synthetic
acaaugaugaacuggauau

SEQ ID NO: 4522 - RNA, 19 nt, Artificial Sequence
  Synthetic
gcagacaaauaugagauua

SEQ ID NO: 4523 - RNA, 19 nt, Artificial Sequence
  Synthetic
ggcuuuaucugcugggaca

SEQ ID NO: 4524 - RNA, 19 nt, Artificial Sequence
  Synthetic
gggcacacggaauggguca

SEQ ID NO: 4525 - RNA, 19 nt, Artificial Sequence
  Synthetic
agguuuauuugaaggcuau

SEQ ID NO: 4526 - RNA, 19 nt, Artificial Sequence
  Synthetic
aagguuuauuugaaggcua

SEQ ID NO: 4527 - RNA, 19 nt, Artificial Sequence
  Synthetic
ccacaggcgccaagagcaa

SEQ ID NO: 4528 - RNA, 19 nt, Artificial Sequence
  Synthetic
ggaccacgucauagacaua

SEQ ID NO: 4529 - RNA, 19 nt, Artificial Sequence
  Synthetic
gggagcaguucuaccgcua

SEQ ID NO: 4530 - RNA, 19 nt, Artificial Sequence
  Synthetic
ggcacgaggauguggucaa

SEQ ID NO: 4531 - RNA, 19 nt, Artificial Sequence
  Synthetic
cgggagagguggagaugcu

SEQ ID NO: 4532 - RNA, 19 nt, Artificial Sequence
  Synthetic
cugugaagaucuggagcaa

SEQ ID NO: 4533 - RNA, 19 nt, Artificial Sequence
  Synthetic
ucauagacauacacggaca

SEQ ID NO: 4534 - RNA, 19 nt, Artificial Sequence
  Synthetic
ggaacaagcccuaugacgu

SEQ ID NO: 4535 - RNA, 19 nt, Artificial Sequence
  Synthetic
ggagagguggagaugcuua

SEQ ID NO: 4536 - RNA, 19 nt, Artificial Sequence
  Synthetic
cccuacaacuggagcuaca

SEQ ID NO: 4537 - RNA, 19 nt, Artificial Sequence
  Synthetic
guguuuggcuguuggcuca

SEQ ID NO: 4538 - RNA, 19 nt, Artificial Sequence
  Synthetic
caacaaugccuuccaggau

SEQ ID NO: 4539 - RNA, 19 nt, Artificial Sequence
  Synthetic
cgucauagacauacacgga

SEQ ID NO: 4540 - RNA, 19 nt, Artificial Sequence
  Synthetic
caccaaucgcggaggagau

SEQ ID NO: 4541 - RNA, 19 nt, Artificial Sequence
  Synthetic
agauugaccugcugguguu

SEQ ID NO: 4542 - RNA, 19 nt, Artificial Sequence
  Synthetic
gugaagaucuggagcaacg

SEQ ID NO: 4543 - RNA, 19 nt, Artificial Sequence
  Synthetic
gagagguggagaugcuuau

SEQ ID NO: 4544 - RNA, 19 nt, Artificial Sequence
  Synthetic
agacauacacggacacauc

SEQ ID NO: 4545 - RNA, 19 nt, Artificial Sequence
  Synthetic
ccacacgcucacacacaaa

SEQ ID NO: 4546 - RNA, 19 nt, Artificial Sequence
  Synthetic
ggcagaaugucacgaugga

SEQ ID NO: 4547 - RNA, 19 nt, Artificial Sequence
  Synthetic
uuauagcaguuacgccuua

SEQ ID NO: 4548 - RNA, 19 nt, Artificial Sequence
  Synthetic
gcucggugcuguggcucaa

SEQ ID NO: 4549 - RNA, 19 nt, Artificial Sequence
  Synthetic
cgacgacgccaccaucaaa

SEQ ID NO: 4550 - RNA, 19 nt, Artificial Sequence
  Synthetic
ugucggagcgcaugcuaga

SEQ ID NO: 4551 - RNA, 19 nt, Artificial Sequence
  Synthetic
gagcaguucuaccgcuacu

SEQ ID NO: 4552 - RNA, 19 nt, Artificial Sequence
  Synthetic
uccaaggacugcacuguga

SEQ ID NO: 4553 - RNA, 19 nt, Artificial Sequence
  Synthetic
acaaugccuuccaggaugu

SEQ ID NO: 4554 - RNA, 19 nt, Artificial Sequence
  Synthetic
gcccgaguguguugcaugu

SEQ ID NO: 4555 - RNA, 19 nt, Artificial Sequence
  Synthetic
ccaaggacugcacugugaa

SEQ ID NO: 4556 - RNA, 19 nt, Artificial Sequence
  Synthetic
gcaaguaccucaucuucac

SEQ ID NO: 4557 - RNA, 19 nt, Artificial Sequence
  Synthetic
cauuagaaucugugacaua

SEQ ID NO: 4558 - RNA, 19 nt, Artificial Sequence
  Synthetic
gaaaggaacugcaauaaua

SEQ ID NO: 4559 - RNA, 19 nt, Artificial Sequence
  Synthetic
ccaagaagaacaagaggaa

SEQ ID NO: 4560 - RNA, 19 nt, Artificial Sequence
  Synthetic
gaaaagaccuacagacuaa

SEQ ID NO: 4561 - RNA, 19 nt, Artificial Sequence
  Synthetic
cuagaaaggaacugcaaua

SEQ ID NO: 4562 - RNA, 19 nt, Artificial Sequence
  Synthetic
gaauggaacucaaagacaa

SEQ ID NO: 4563 - RNA, 19 nt, Artificial Sequence
  Synthetic
augcaaagucucagaauau

SEQ ID NO: 4564 - RNA, 19 nt, Artificial Sequence
  Synthetic
gggaaagaaaccaugcaaa

SEQ ID NO: 4565 - RNA, 19 nt, Artificial Sequence
  Synthetic
acucuuaggguuugggaua

SEQ ID NO: 4566 - RNA, 19 nt, Artificial Sequence
  Synthetic
ccgaauaguuagugguucu

SEQ ID NO: 4567 - RNA, 19 nt, Artificial Sequence
  Synthetic
gggacauacagguggagua

SEQ ID NO: 4568 - RNA, 19 nt, Artificial Sequence
  Synthetic
gguuguuaguggagcauau

SEQ ID NO: 4569 - RNA, 19 nt, Artificial Sequence
  Synthetic
ggaguggaccagagaaauu

SEQ ID NO: 4570 - RNA, 19 nt, Artificial Sequence
  Synthetic
guuaacaaguggaauggaa

SEQ ID NO: 4571 - RNA, 19 nt, Artificial Sequence
  Synthetic
ggaguauggucaucacaaa

SEQ ID NO: 4572 - RNA, 19 nt, Artificial Sequence
  Synthetic
aaucaaaccaggugcaauu

SEQ ID NO: 4573 - RNA, 19 nt, Artificial Sequence
  Synthetic
acauaugaugcaagugaua

SEQ ID NO: 4574 - RNA, 19 nt, Artificial Sequence
  Synthetic
caugcaaagucucagaaua

SEQ ID NO: 4575 - RNA, 19 nt, Artificial Sequence
  Synthetic
cauuacaguuugaugguau

SEQ ID NO: 4576 - RNA, 19 nt, Artificial Sequence
  Synthetic
gaauuuuggcugaagacaa

SEQ ID NO: 4577 - RNA, 19 nt, Artificial Sequence
  Synthetic
caacaacgacgccgaauua

SEQ ID NO: 4578 - RNA, 19 nt, Artificial Sequence
  Synthetic
gggcauacuaauagagucu

SEQ ID NO: 4579 - RNA, 19 nt, Artificial Sequence
  Synthetic
ugaaguuguuggaguagaa

SEQ ID NO: 4580 - RNA, 19 nt, Artificial Sequence
  Synthetic
agaggaagaugaagaacau

SEQ ID NO: 4581 - RNA, 19 nt, Artificial Sequence
  Synthetic
gguuugggauauugagaca

SEQ ID NO: 4582 - RNA, 19 nt, Artificial Sequence
  Synthetic
acagaugaaucguguggua

SEQ ID NO: 4583 - RNA, 19 nt, Artificial Sequence
  Synthetic
gaagaugaacauacacaua

SEQ ID NO: 4584 - RNA, 19 nt, Artificial Sequence
  Synthetic
ugaagaacaugcuggugaa

SEQ ID NO: 4585 - RNA, 19 nt, Artificial Sequence
  Synthetic
cggaaugggacugaagaaa

SEQ ID NO: 4586 - RNA, 19 nt, Artificial Sequence
  Synthetic
cagagaagaugaacauaca

SEQ ID NO: 4587 - RNA, 19 nt, Artificial Sequence
  Synthetic
caggaaagaacuaggaaga

SEQ ID NO: 4588 - RNA, 19 nt, Artificial Sequence
  Synthetic
cgucaguggaggcgaggaa

SEQ ID NO: 4589 - RNA, 19 nt, Artificial Sequence
  Synthetic
aggaugaggugcuguggua

SEQ ID NO: 4590 - RNA, 19 nt, Artificial Sequence
  Synthetic
gcaaaggugccgugagcga

SEQ ID NO: 4591 - RNA, 19 nt, Artificial Sequence
  Synthetic
aaucagaggacgaggagga

SEQ ID NO: 4592 - RNA, 19 nt, Artificial Sequence
  Synthetic
cagaggacgaggaggauga

SEQ ID NO: 4593 - RNA, 19 nt, Artificial Sequence
  Synthetic
agcaagacguggaagguga

SEQ ID NO: 4594 - RNA, 19 nt, Artificial Sequence
  Synthetic
guguggucauugcgggaua

SEQ ID NO: 4595 - RNA, 19 nt, Artificial Sequence
  Synthetic
ggaaagaacuaggaagaug

SEQ ID NO: 4596 - RNA, 19 nt, Artificial Sequence
  Synthetic
caauguaucuucaggaaaa

SEQ ID NO: 4597 - RNA, 19 nt, Artificial Sequence
  Synthetic
gaagcugacagaagagaua

SEQ ID NO: 4598 - RNA, 19 nt, Artificial Sequence
  Synthetic
gcaauguaucuucaggaaa

SEQ ID NO: 4599 - RNA, 19 nt, Artificial Sequence
  Synthetic
gcaugaacgacccagaaua

SEQ ID NO: 4600 - RNA, 19 nt, Artificial Sequence
  Synthetic
auaaauguccagagccuaa

SEQ ID NO: 4601 - RNA, 19 nt, Artificial Sequence
  Synthetic
agaagcugcuacaggacaa

SEQ ID NO: 4602 - RNA, 19 nt, Artificial Sequence
  Synthetic
gacaauaacgucauguuua

SEQ ID NO: 4603 - RNA, 19 nt, Artificial Sequence
  Synthetic
acacacaguugcucagcua

SEQ ID NO: 4604 - RNA, 19 nt, Artificial Sequence
  Synthetic
ggacaauaacgucauguuu

SEQ ID NO: 4605 - RNA, 19 nt, Artificial Sequence
  Synthetic
gccgagugauagagcagaa

SEQ ID NO: 4606 - RNA, 19 nt, Artificial Sequence
  Synthetic
gccuuuggcuggagaggau

SEQ ID NO: 4607 - RNA, 19 nt, Artificial Sequence
  Synthetic
guaggaagcaagagacuua

SEQ ID NO: 4608 - RNA, 19 nt, Artificial Sequence
  Synthetic
ugguauaugacgugcgaaa

SEQ ID NO: 4609 - RNA, 19 nt, Artificial Sequence
  Synthetic
gcauagacuuucagacaga

SEQ ID NO: 4610 - RNA, 19 nt, Artificial Sequence
  Synthetic
cagaauaggauuggaauua

SEQ ID NO: 4611 - RNA, 19 nt, Artificial Sequence
  Synthetic
ggaaacaggccgaguuaga

SEQ ID NO: 4612 - RNA, 19 nt, Artificial Sequence
  Synthetic
ugucagagaucaggagaaa

SEQ ID NO: 4613 - RNA, 19 nt, Artificial Sequence
  Synthetic
ggaacagaugcuaaggaaa

SEQ ID NO: 4614 - RNA, 19 nt, Artificial Sequence
  Synthetic
ggaagcagcuagugaacga

SEQ ID NO: 4615 - RNA, 19 nt, Artificial Sequence
  Synthetic
cgaagugugcugauggaaa

SEQ ID NO: 4616 - RNA, 19 nt, Artificial Sequence
  Synthetic
gguuagauguuguuugcua

SEQ ID NO: 4617 - RNA, 19 nt, Artificial Sequence
  Synthetic
gaugcaacguagauguaaa

SEQ ID NO: 4618 - RNA, 19 nt, Artificial Sequence
  Synthetic
cauuugaggugaaccguaa

SEQ ID NO: 4619 - RNA, 19 nt, Artificial Sequence
  Synthetic
cguaacagcuacuuggcua

SEQ ID NO: 4620 - RNA, 19 nt, Artificial Sequence
  Synthetic
ggaguuaguagcucagaaa

SEQ ID NO: 4621 - RNA, 19 nt, Artificial Sequence
  Synthetic
gaagugugcugauggaaau

SEQ ID NO: 4622 - RNA, 19 nt, Artificial Sequence
  Synthetic
gagcaagacuccaucucaa

SEQ ID NO: 4623 - RNA, 19 nt, Artificial Sequence
  Synthetic
gaacagaugcuaaggaaac

SEQ ID NO: 4624 - RNA, 19 nt, Artificial Sequence
  Synthetic
gcccagagaaugauggcaa

SEQ ID NO: 4625 - RNA, 19 nt, Artificial Sequence
  Synthetic
aggaacagaugcuaaggaa

SEQ ID NO: 4626 - RNA, 19 nt, Artificial Sequence
  Synthetic
agugauaggucaaagcuuu

SEQ ID NO: 4627 - RNA, 19 nt, Artificial Sequence
  Synthetic
gcauuaaguucauugcuuu

SEQ ID NO: 4628 - RNA, 19 nt, Artificial Sequence
  Synthetic
caaaagaccuucacaguau

SEQ ID NO: 4629 - RNA, 19 nt, Artificial Sequence
  Synthetic
cuugcaaacuauugaccaa

SEQ ID NO: 4630 - RNA, 19 nt, Artificial Sequence
  Synthetic
cugcauagacuuucagaca

SEQ ID NO: 4631 - RNA, 19 nt, Artificial Sequence
  Synthetic
gaacaggagcgcaugaaaa

SEQ ID NO: 4632 - RNA, 19 nt, Artificial Sequence
  Synthetic
agacaaauaccguggucca

SEQ ID NO: 4633 - RNA, 19 nt, Artificial Sequence
  Synthetic
cugaaggaacagaugcuaa

SEQ ID NO: 4634 - RNA, 19 nt, Artificial Sequence
  Synthetic
guauaugacgugcgaaaca

SEQ ID NO: 4635 - RNA, 19 nt, Artificial Sequence
  Synthetic
guguuaagauguugaguac

SEQ ID NO: 4636 - RNA, 19 nt, Artificial Sequence
  Synthetic
uuuccaaagcccagagaau

SEQ ID NO: 4637 - RNA, 19 nt, Artificial Sequence
  Synthetic
ggaaauagcuacaguuuua

SEQ ID NO: 4638 - RNA, 19 nt, Artificial Sequence
  Synthetic
ggaaauaguuugcagauaa

SEQ ID NO: 4639 - RNA, 19 nt, Artificial Sequence
  Synthetic
ccauaaagauugugcuaau

SEQ ID NO: 4640 - RNA, 19 nt, Artificial Sequence
  Synthetic
agaagaagcuggaggcauu

SEQ ID NO: 4641 - RNA, 19 nt, Artificial Sequence
  Synthetic
agacaaagcaguaaaggaa

SEQ ID NO: 4642 - RNA, 19 nt, Artificial Sequence
  Synthetic
gaacauggauccaagaaau

SEQ ID NO: 4643 - RNA, 19 nt, Artificial Sequence
  Synthetic
gaacaaagcugaugcaacu

SEQ ID NO: 4644 - RNA, 19 nt, Artificial Sequence
  Synthetic
cagugaaacgggagagcaa

SEQ ID NO: 4645 - RNA, 19 nt, Artificial Sequence
  Synthetic
agagagugacagugagaaa

SEQ ID NO: 4646 - RNA, 19 nt, Artificial Sequence
  Synthetic
gggaaauaguuugcagaua

SEQ ID NO: 4647 - RNA, 19 nt, Artificial Sequence
  Synthetic
cugacuagguguaaugaaa

SEQ ID NO: 4648 - RNA, 19 nt, Artificial Sequence
  Synthetic
uuauaaagccugugcauuu

SEQ ID NO: 4649 - RNA, 19 nt, Artificial Sequence
  Synthetic
ggauauaauagaagcaguu

SEQ ID NO: 4650 - RNA, 19 nt, Artificial Sequence
  Synthetic
caguacacaugaugauaaa

SEQ ID NO: 4651 - RNA, 19 nt, Artificial Sequence
  Synthetic
guuacugaguguugaggaa

SEQ ID NO: 4652 - RNA, 19 nt, Artificial Sequence
  Synthetic
gcaaagacuaugagcaguu

SEQ ID NO: 4653 - RNA, 19 nt, Artificial Sequence
  Synthetic
gcaagaaaaugaugaugaa

SEQ ID NO: 4654 - RNA, 19 nt, Artificial Sequence
  Synthetic
ggaugaagcuauagacaug

SEQ ID NO: 4655 - RNA, 19 nt, Artificial Sequence
  Synthetic
acaaagcaguaaaggaaaa

SEQ ID NO: 4656 - RNA, 19 nt, Artificial Sequence
  Synthetic
gacuagguguaaugaaaua

SEQ ID NO: 4657 - RNA, 19 nt, Artificial Sequence
  Synthetic
cuaccaagacuguguacaa

SEQ ID NO: 4658 - RNA, 19 nt, Artificial Sequence
  Synthetic
gaucagagagugacaguga

SEQ ID NO: 4659 - RNA, 19 nt, Artificial Sequence
  Synthetic
gcauauagaucacuuguau

SEQ ID NO: 4660 - RNA, 19 nt, Artificial Sequence
  Synthetic
cuacaaauguuuagcuguu

SEQ ID NO: 4661 - RNA, 19 nt, Artificial Sequence
  Synthetic
uacaagacauggagaagaa

SEQ ID NO: 4662 - RNA, 19 nt, Artificial Sequence
  Synthetic
ugacauaugcugaaguuau

SEQ ID NO: 4663 - RNA, 19 nt, Artificial Sequence
  Synthetic
gcagauaauggaggaguaa

SEQ ID NO: 4664 - RNA, 19 nt, Artificial Sequence
  Synthetic
gaaaagaaaggguguaaau

SEQ ID NO: 4665 - RNA, 19 nt, Artificial Sequence
  Synthetic
acaugagauucgacuguua

SEQ ID NO: 4666 - RNA, 19 nt, Artificial Sequence
  Synthetic
gaauaaugcucccagacuu

SEQ ID NO: 4667 - RNA, 19 nt, Artificial Sequence
  Synthetic
gaacagcgacaucgagaaa

SEQ ID NO: 4668 - RNA, 19 nt, Artificial Sequence
  Synthetic
gaggcuggcuguagguaaa

SEQ ID NO: 4669 - RNA, 19 nt, Artificial Sequence
  Synthetic
cagaagaccugcaagaaca

SEQ ID NO: 4670 - RNA, 19 nt, Artificial Sequence
  Synthetic
cuacauuugacauggauua

SEQ ID NO: 4671 - RNA, 19 nt, Artificial Sequence
  Synthetic
ggacagacagacaugcaaa

SEQ ID NO: 4672 - RNA, 19 nt, Artificial Sequence
  Synthetic
gauauuuacccgcaggaua

SEQ ID NO: 4673 - RNA, 19 nt, Artificial Sequence
  Synthetic
acacacuggugcagagaga

SEQ ID NO: 4674 - RNA, 19 nt, Artificial Sequence
  Synthetic
gacugaagcacauguaaua

SEQ ID NO: 4675 - RNA, 19 nt, Artificial Sequence
  Synthetic
gagaaccauuccugggauu

SEQ ID NO: 4676 - RNA, 19 nt, Artificial Sequence
  Synthetic
cugaagcacauguaauaua

SEQ ID NO: 4677 - RNA, 19 nt, Artificial Sequence
  Synthetic
ugaagcagaggcugaguua

SEQ ID NO: 4678 - RNA, 19 nt, Artificial Sequence
  Synthetic
ugacagacggacagacaga

SEQ ID NO: 4679 - RNA, 19 nt, Artificial Sequence
  Synthetic
aagagaacccggacaguga

SEQ ID NO: 4680 - RNA, 19 nt, Artificial Sequence
  Synthetic
gcccggagacaguaauaaa

SEQ ID NO: 4681 - RNA, 19 nt, Artificial Sequence
  Synthetic
gagccaggagccaggauau

SEQ ID NO: 4682 - RNA, 19 nt, Artificial Sequence
  Synthetic
acaccagacugaagcacau

SEQ ID NO: 4683 - RNA, 19 nt, Artificial Sequence
  Synthetic
ggacaugauccucuccuua

SEQ ID NO: 4684 - RNA, 19 nt, Artificial Sequence
  Synthetic
ggacagugaugcugacuug

SEQ ID NO: 4685 - RNA, 19 nt, Artificial Sequence
  Synthetic
ggauuaaaccaguauaaac

SEQ ID NO: 4686 - RNA, 19 nt, Artificial Sequence
  Synthetic
gguguucagugguguauau

SEQ ID NO: 4687 - RNA, 19 nt, Artificial Sequence
  Synthetic
uaauauagaccguguaugu

SEQ ID NO: 4688 - RNA, 19 nt, Artificial Sequence
  Synthetic
guacacacacacacauuua

SEQ ID NO: 4689 - RNA, 19 nt, Artificial Sequence
  Synthetic
guacauacaugcacauacu

SEQ ID NO: 4690 - RNA, 19 nt, Artificial Sequence
  Synthetic
ggaggcuggcuguagguaa

SEQ ID NO: 4691 - RNA, 19 nt, Artificial Sequence
  Synthetic
caugcaaacaccagacuga

SEQ ID NO: 4692 - RNA, 19 nt, Artificial Sequence
  Synthetic
ccaggagccaggauauuua

SEQ ID NO: 4693 - RNA, 19 nt, Artificial Sequence
  Synthetic
aaacaugcguacacacaca

SEQ ID NO: 4694 - RNA, 19 nt, Artificial Sequence
  Synthetic
ggacaucgagcaugagaac

SEQ ID NO: 4695 - RNA, 19 nt, Artificial Sequence
  Synthetic
gcucacagaagcugccuau

SEQ ID NO: 4696 - RNA, 19 nt, Artificial Sequence
  Synthetic
gggcacggcuccuaagauc

SEQ ID NO: 4697 - RNA, 19 nt, Artificial Sequence
  Synthetic
uggaagagcuggagaagca

SEQ ID NO: 4698 - RNA, 19 nt, Artificial Sequence
  Synthetic
ccaacaucguggagcgcua

SEQ ID NO: 4699 - RNA, 19 nt, Artificial Sequence
  Synthetic
gcgagaaguucccuggcaa

SEQ ID NO: 4700 - RNA, 19 nt, Artificial Sequence
  Synthetic
gcugcaagacugagccuaa

SEQ ID NO: 4701 - RNA, 19 nt, Artificial Sequence
  Synthetic
agcagaaaguccagcgcua

SEQ ID NO: 4702 - RNA, 19 nt, Artificial Sequence
  Synthetic
ugaccgacaucgagcagaa

SEQ ID NO: 4703 - RNA, 19 nt, Artificial Sequence
  Synthetic
gggacagggugaggguaua

SEQ ID NO: 4704 - RNA, 19 nt, Artificial Sequence
  Synthetic
gggccuagauucugcacuu

SEQ ID NO: 4705 - RNA, 19 nt, Artificial Sequence
  Synthetic
agaagcaguuguuguaauu

SEQ ID NO: 4706 - RNA, 19 nt, Artificial Sequence
  Synthetic
gcaagggagucugggaaau

SEQ ID NO: 4707 - RNA, 19 nt, Artificial Sequence
  Synthetic
cagaagcaguuguuguaau

SEQ ID NO: 4708 - RNA, 19 nt, Artificial Sequence
  Synthetic
agagggagcugaaggacca

SEQ ID NO: 4709 - RNA, 19 nt, Artificial Sequence
  Synthetic
agguggugguggcggagaa

SEQ ID NO: 4710 - RNA, 19 nt, Artificial Sequence
  Synthetic
ucgacgagcugcagaggga

SEQ ID NO: 4711 - RNA, 19 nt, Artificial Sequence
  Synthetic
cuacaaugcugaugacaug

SEQ ID NO: 4712 - RNA, 19 nt, Artificial Sequence
  Synthetic
acuuguagcugguuuaauu

SEQ ID NO: 4713 - RNA, 19 nt, Artificial Sequence
  Synthetic
ccauuguggcuuacggcaa

SEQ ID NO: 4714 - RNA, 19 nt, Artificial Sequence
  Synthetic
uagaggagcuggaggcgga

SEQ ID NO: 4715 - RNA, 19 nt, Artificial Sequence
  Synthetic
gacaacuggcggagaccaa

SEQ ID NO: 4716 - RNA, 19 nt, Artificial Sequence
  Synthetic
aaaagcaacugcaggacaa

SEQ ID NO: 4717 - RNA, 19 nt, Artificial Sequence
  Synthetic
gccagaaggccaugcuaga

SEQ ID NO: 4718 - RNA, 19 nt, Artificial Sequence
  Synthetic
cagaaaguccagcgcuaca

SEQ ID NO: 4719 - RNA, 19 nt, Artificial Sequence
  Synthetic
cugcaagacugagccuaaa

SEQ ID NO: 4720 - RNA, 19 nt, Artificial Sequence
  Synthetic
gccucaagcuggccaacau

SEQ ID NO: 4721 - RNA, 19 nt, Artificial Sequence
  Synthetic
agaccaaccucacauauga

SEQ ID NO: 4722 - RNA, 19 nt, Artificial Sequence
  Synthetic
cgccaaagcgcuucgaugu

SEQ ID NO: 4723 - RNA, 19 nt, Artificial Sequence
  Synthetic
agacaaggauuuacuaccu

SEQ ID NO: 4724 - RNA, 19 nt, Artificial Sequence
  Synthetic
acugcaccauuguggcuua

SEQ ID NO: 4725 - RNA, 19 nt, Artificial Sequence
  Synthetic
ggacuaccuuccagugucu

SEQ ID NO: 4726 - RNA, 19 nt, Artificial Sequence
  Synthetic
ugucagacuuggcaucuau

SEQ ID NO: 4727 - RNA, 19 nt, Artificial Sequence
  Synthetic
ccacagaacuggaaccaua

SEQ ID NO: 4728 - RNA, 19 nt, Artificial Sequence
  Synthetic
agaugaaacugcaaggaaa

SEQ ID NO: 4729 - RNA, 19 nt, Artificial Sequence
  Synthetic
ccaacaagauucagaagaa

SEQ ID NO: 4730 - RNA, 19 nt, Artificial Sequence
  Synthetic
agacauugauggagaugaa

SEQ ID NO: 4731 - RNA, 19 nt, Artificial Sequence
  Synthetic
caaaguaacugguggcuau

SEQ ID NO: 4732 - RNA, 19 nt, Artificial Sequence
  Synthetic
cagaagaacuguugaaacu

SEQ ID NO: 4733 - RNA, 19 nt, Artificial Sequence
  Synthetic
uggcacaagcaaagagaaa

SEQ ID NO: 4734 - RNA, 19 nt, Artificial Sequence
  Synthetic
gcagugaagaugagaggaa

SEQ ID NO: 4735 - RNA, 19 nt, Artificial Sequence
  Synthetic
ggaauuuggucaagguuau

SEQ ID NO: 4736 - RNA, 19 nt, Artificial Sequence
  Synthetic
gcgcauagcugguaaaauu

SEQ ID NO: 4737 - RNA, 19 nt, Artificial Sequence
  Synthetic
gcaaacaaauccuggcauu

SEQ ID NO: 4738 - RNA, 19 nt, Artificial Sequence
  Synthetic
agauacaacaggagaagaa

SEQ ID NO: 4739 - RNA, 19 nt, Artificial Sequence
  Synthetic
aagagaagccugauguaaa

SEQ ID NO: 4740 - RNA, 19 nt, Artificial Sequence
  Synthetic
guguagaauuagcaagauu

SEQ ID NO: 4741 - RNA, 19 nt, Artificial Sequence
  Synthetic
auauuuacauggaggcaua

SEQ ID NO: 4742 - RNA, 19 nt, Artificial Sequence
  Synthetic
aaacauaacgcaagcaaau

SEQ ID NO: 4743 - RNA, 19 nt, Artificial Sequence
  Synthetic
auacagugggcaagagaua

SEQ ID NO: 4744 - RNA, 19 nt, Artificial Sequence
  Synthetic
ggauuaaggcaguuacaau

SEQ ID NO: 4745 - RNA, 19 nt, Artificial Sequence
  Synthetic
gugcagauguacauggaau

SEQ ID NO: 4746 - RNA, 19 nt, Artificial Sequence
  Synthetic
agauagauaugaugccuua

SEQ ID NO: 4747 - RNA, 19 nt, Artificial Sequence
  Synthetic
aggcaaaccugaaugugaa

SEQ ID NO: 4748 - RNA, 19 nt, Artificial Sequence
  Synthetic
ccauaaggcucuucagcuu

SEQ ID NO: 4749 - RNA, 19 nt, Artificial Sequence
  Synthetic
ggagaagaaccaaaagaaa

SEQ ID NO: 4750 - RNA, 19 nt, Artificial Sequence
  Synthetic
caacaggagaagaaccaaa

SEQ ID NO: 4751 - RNA, 19 nt, Artificial Sequence
  Synthetic
ucaaagagaaguauggaau

SEQ ID NO: 4752 - RNA, 19 nt, Artificial Sequence
  Synthetic
guacauggaauuuggucaa

SEQ ID NO: 4753 - RNA, 19 nt, Artificial Sequence
  Synthetic
gugaagaugauguuguuaa

SEQ ID NO: 4754 - RNA, 19 nt, Artificial Sequence
  Synthetic
gagauaaguuugaaaguuc

SEQ ID NO: 4755 - RNA, 19 nt, Artificial Sequence
  Synthetic
gcaacaucuauaagugaaa

SEQ ID NO: 4756 - RNA, 19 nt, Artificial Sequence
  Synthetic
gcaagagauaaguuugaaa

SEQ ID NO: 4757 - RNA, 19 nt, Artificial Sequence
  Synthetic
ugucugagcuguagugaaa

SEQ ID NO: 4758 - RNA, 19 nt, Artificial Sequence
  Synthetic
gggcaaagaacauggacau

SEQ ID NO: 4759 - RNA, 19 nt, Artificial Sequence
  Synthetic
uguuuggaguggagggaaa

SEQ ID NO: 4760 - RNA, 19 nt, Artificial Sequence
  Synthetic
ccaaggaacugcacagcaa

SEQ ID NO: 4761 - RNA, 19 nt, Artificial Sequence
  Synthetic
guacauugcucaaaagaua

SEQ ID NO: 4762 - RNA, 19 nt, Artificial Sequence
  Synthetic
gcacaaagauucaggagcu

SEQ ID NO: 4763 - RNA, 19 nt, Artificial Sequence
  Synthetic
caaagaacauggacauuau

SEQ ID NO: 4764 - RNA, 19 nt, Artificial Sequence
  Synthetic
gcaaagaacauggacauua

SEQ ID NO: 4765 - RNA, 19 nt, Artificial Sequence
  Synthetic
caacacaguuccugcagua

SEQ ID NO: 4766 - RNA, 19 nt, Artificial Sequence
  Synthetic
cugcacagcaagugggaga

SEQ ID NO: 4767 - RNA, 19 nt, Artificial Sequence
  Synthetic
agagggagcgugacagaua

SEQ ID NO: 4768 - RNA, 19 nt, Artificial Sequence
  Synthetic
cagcgguggccgugaacua

SEQ ID NO: 4769 - RNA, 19 nt, Artificial Sequence
  Synthetic
gaaaggacccaaaguguga

SEQ ID NO: 4770 - RNA, 19 nt, Artificial Sequence
  Synthetic
cagaagagggagcgugaca

SEQ ID NO: 4771 - RNA, 19 nt, Artificial Sequence
  Synthetic
acagcaagugggagagaca

SEQ ID NO: 4772 - RNA, 19 nt, Artificial Sequence
  Synthetic
gggaugagaaccaguacuu

SEQ ID NO: 4773 - RNA, 19 nt, Artificial Sequence
  Synthetic
gaagagggagcgugacaga

SEQ ID NO: 4774 - RNA, 19 nt, Artificial Sequence
  Synthetic
caacaggggcugccgguaa

SEQ ID NO: 4775 - RNA, 19 nt, Artificial Sequence
  Synthetic
cccaaaggucacugcacaa

SEQ ID NO: 4776 - RNA, 19 nt, Artificial Sequence
  Synthetic
ucguagcccuggagcacaa

SEQ ID NO: 4777 - RNA, 19 nt, Artificial Sequence
  Synthetic
uggcuguaauggaguguga

SEQ ID NO: 4778 - RNA, 19 nt, Artificial Sequence
  Synthetic
uggagaagagggagaagca

SEQ ID NO: 4779 - RNA, 19 nt, Artificial Sequence
  Synthetic
gcagaacguacauguguuu

SEQ ID NO: 4780 - RNA, 19 nt, Artificial Sequence
  Synthetic
gcccaaaggucacugcaca

SEQ ID NO: 4781 - RNA, 19 nt, Artificial Sequence
  Synthetic
ggaaugggcugaacguguu

SEQ ID NO: 4782 - RNA, 19 nt, Artificial Sequence
  Synthetic
cagcagauuccgucacaga

SEQ ID NO: 4783 - RNA, 19 nt, Artificial Sequence
  Synthetic
gggagaagcacgucacugu

SEQ ID NO: 4784 - RNA, 19 nt, Artificial Sequence
  Synthetic
agagacaggacuacgaaaa

SEQ ID NO: 4785 - RNA, 19 nt, Artificial Sequence
  Synthetic
aggaaugggcugaacgugu

SEQ ID NO: 4786 - RNA, 19 nt, Artificial Sequence
  Synthetic
ggaauaaaaugcuuguuca

SEQ ID NO: 4787 - RNA, 19 nt, Artificial Sequence
  Synthetic
gcagaaacgacuacagaaa

SEQ ID NO: 4788 - RNA, 19 nt, Artificial Sequence
  Synthetic
gaaguaaagguaugaguaa

SEQ ID NO: 4789 - RNA, 19 nt, Artificial Sequence
  Synthetic
gaaaugaacuuacugguua

SEQ ID NO: 4790 - RNA, 19 nt, Artificial Sequence
  Synthetic
uaacauuggcagagaggua

SEQ ID NO: 4791 - RNA, 19 nt, Artificial Sequence
  Synthetic
ggcugaaagguuugaaaua

SEQ ID NO: 4792 - RNA, 19 nt, Artificial Sequence
  Synthetic
gaaauauccugcagugaau

SEQ ID NO: 4793 - RNA, 19 nt, Artificial Sequence
  Synthetic
agaaacgacuacagaaaga

SEQ ID NO: 4794 - RNA, 19 nt, Artificial Sequence
  Synthetic
gaagugaccuauaggcaau

SEQ ID NO: 4795 - RNA, 19 nt, Artificial Sequence
  Synthetic
gcagagagguacaguaugu

SEQ ID NO: 4796 - RNA, 19 nt, Artificial Sequence
  Synthetic
ggaaugaccuuaaaugaga

SEQ ID NO: 4797 - RNA, 19 nt, Artificial Sequence
  Synthetic
ggucauguuuacuggugaa

SEQ ID NO: 4798 - RNA, 19 nt, Artificial Sequence
  Synthetic
ugacagaggcuuaauguuu

SEQ ID NO: 4799 - RNA, 19 nt, Artificial Sequence
  Synthetic
ugucaggaaaugucaaaua

SEQ ID NO: 4800 - RNA, 19 nt, Artificial Sequence
  Synthetic
gaagauaguccuacugaga

SEQ ID NO: 4801 - RNA, 19 nt, Artificial Sequence
  Synthetic
ccuuaaaugagaagagugu

SEQ ID NO: 4802 - RNA, 19 nt, Artificial Sequence
  Synthetic
gcgaacauguaacaagaau

SEQ ID NO: 4803 - RNA, 19 nt, Artificial Sequence
  Synthetic
cauggaagauuuucaagua

SEQ ID NO: 4804 - RNA, 19 nt, Artificial Sequence
  Synthetic
ggucauaucuguuuaucca

SEQ ID NO: 4805 - RNA, 19 nt, Artificial Sequence
  Synthetic
agacauggaaggugcauca

SEQ ID NO: 4806 - RNA, 19 nt, Artificial Sequence
  Synthetic
ggacuguaaugaaagauca

SEQ ID NO: 4807 - RNA, 19 nt, Artificial Sequence
  Synthetic
cagaaagaacuguuggcuu

SEQ ID NO: 4808 - RNA, 19 nt, Artificial Sequence
  Synthetic
gcagugaauauaugaauca

SEQ ID NO: 4809 - RNA, 19 nt, Artificial Sequence
  Synthetic
ugaaauauccugcagugaa

SEQ ID NO: 4810 - RNA, 19 nt, Artificial Sequence
  Synthetic
ccaguuggcugaaagguuu

SEQ ID NO: 4811 - RNA, 19 nt, Artificial Sequence
  Synthetic
guauauaguuccucaaucu

SEQ ID NO: 4812 - RNA, 19 nt, Artificial Sequence
  Synthetic
ucacacagccauauaguuu

SEQ ID NO: 4813 - RNA, 19 nt, Artificial Sequence
  Synthetic
agugagggauccaacauua

SEQ ID NO: 4814 - RNA, 19 nt, Artificial Sequence
  Synthetic
gugcgaacauguaacaaga

SEQ ID NO: 4815 - RNA, 19 nt, Artificial Sequence
  Synthetic
gcuuacagcuagaugaaac

SEQ ID NO: 4816 - RNA, 19 nt, Artificial Sequence
  Synthetic
uggcagugaugauuaaauu

SEQ ID NO: 4817 - RNA, 19 nt, Artificial Sequence
  Synthetic
gaauaaagugggaggucaa

SEQ ID NO: 4818 - RNA, 19 nt, Artificial Sequence
  Synthetic
gaauagugaugaagagcau

SEQ ID NO: 4819 - RNA, 19 nt, Artificial Sequence
  Synthetic
gcuggugcaucgugggaaa

SEQ ID NO: 4820 - RNA, 19 nt, Artificial Sequence
  Synthetic
gcucaagccuggugcacuu

SEQ ID NO: 4821 - RNA, 19 nt, Artificial Sequence
  Synthetic
caagaauagaggucauaua

SEQ ID NO: 4822 - RNA, 19 nt, Artificial Sequence
  Synthetic
augaagagcaucaguggaa

SEQ ID NO: 4823 - RNA, 19 nt, Artificial Sequence
  Synthetic
gaauagaggucauauaguu

SEQ ID NO: 4824 - RNA, 19 nt, Artificial Sequence
  Synthetic
cagaagaugccauggacuu

SEQ ID NO: 4825 - RNA, 19 nt, Artificial Sequence
  Synthetic
ccucuuuggucuuaacuua

SEQ ID NO: 4826 - RNA, 19 nt, Artificial Sequence
  Synthetic
agaaucagcaccauggaua

SEQ ID NO: 4827 - RNA, 19 nt, Artificial Sequence
  Synthetic
ggaacgggacuuugcagaa

SEQ ID NO: 4828 - RNA, 19 nt, Artificial Sequence
  Synthetic
guauagaagagcuaacgua

SEQ ID NO: 4829 - RNA, 19 nt, Artificial Sequence
  Synthetic
gaacgggacuuugcagaaa

SEQ ID NO: 4830 - RNA, 19 nt, Artificial Sequence
  Synthetic
gggaacgggagcuggauga

SEQ ID NO: 4831 - RNA, 19 nt, Artificial Sequence
  Synthetic
cagaagaauaugacagaug

SEQ ID NO: 4832 - RNA, 19 nt, Artificial Sequence
  Synthetic
gaauaucccuacaugauuu

SEQ ID NO: 4833 - RNA, 19 nt, Artificial Sequence
  Synthetic
ggacagguguugcgucuga

SEQ ID NO: 4834 - RNA, 19 nt, Artificial Sequence
  Synthetic
ggcagaagaauaugacaga

SEQ ID NO: 4835 - RNA, 19 nt, Artificial Sequence
  Synthetic
gaacgaagcaggauguugu

SEQ ID NO: 4836 - RNA, 19 nt, Artificial Sequence
  Synthetic
ggaugagguugauauguca

SEQ ID NO: 4837 - RNA, 19 nt, Artificial Sequence
  Synthetic
ggccuggaauagugaugaa

SEQ ID NO: 4838 - RNA, 19 nt, Artificial Sequence
  Synthetic
gggcaugccuaccaaacau

SEQ ID NO: 4839 - RNA, 19 nt, Artificial Sequence
  Synthetic
agaaaugugugcagacuac

SEQ ID NO: 4840 - RNA, 19 nt, Artificial Sequence
  Synthetic
gggcagagccaugacauuu

SEQ ID NO: 4841 - RNA, 19 nt, Artificial Sequence
  Synthetic
ggacauauccaaugaugau

SEQ ID NO: 4842 - RNA, 19 nt, Artificial Sequence
  Synthetic
gaacaaggccccaccguaa

SEQ ID NO: 4843 - RNA, 19 nt, Artificial Sequence
  Synthetic
gcuccgggcuggucaauau

SEQ ID NO: 4844 - RNA, 19 nt, Artificial Sequence
  Synthetic
ucucagacauguugaagca

SEQ ID NO: 4845 - RNA, 19 nt, Artificial Sequence
  Synthetic
ccaaugaugaugaugacau

SEQ ID NO: 4846 - RNA, 19 nt, Artificial Sequence
  Synthetic
caacuucuagauugggaaa

SEQ ID NO: 4847 - RNA, 19 nt, Artificial Sequence
  Synthetic
ccaagaaccuccuggacuc

SEQ ID NO: 4848 - RNA, 19 nt, Artificial Sequence
  Synthetic
uggaacaccucgagcugau

SEQ ID NO: 4849 - RNA, 19 nt, Artificial Sequence
  Synthetic
gcaccagccuagagaagcu

SEQ ID NO: 4850 - RNA, 19 nt, Artificial Sequence
  Synthetic
aggacuaucaggcgaguga

SEQ ID NO: 4851 - RNA, 19 nt, Artificial Sequence
  Synthetic
agaaagugcgugugggcgu

SEQ ID NO: 4852 - RNA, 19 nt, Artificial Sequence
  Synthetic
cggcagagcugggguugaa

SEQ ID NO: 4853 - RNA, 19 nt, Artificial Sequence
  Synthetic
gcgagugaggacaaaguga

SEQ ID NO: 4854 - RNA, 19 nt, Artificial Sequence
  Synthetic
gagaggacauauccaauga

SEQ ID NO: 4855 - RNA, 19 nt, Artificial Sequence
  Synthetic
gcagccuggugaaggugaa

SEQ ID NO: 4856 - RNA, 19 nt, Artificial Sequence
  Synthetic
ccggagaggacauauccaa

SEQ ID NO: 4857 - RNA, 19 nt, Artificial Sequence
  Synthetic
ugaggcagcuggugaagga

SEQ ID NO: 4858 - RNA, 19 nt, Artificial Sequence
  Synthetic
caaugaugaugaugacaug

SEQ ID NO: 4859 - RNA, 19 nt, Artificial Sequence
  Synthetic
uauccaaugaugaugauga

SEQ ID NO: 4860 - RNA, 19 nt, Artificial Sequence
  Synthetic
gcaaggcggaggacgacau

SEQ ID NO: 4861 - RNA, 19 nt, Artificial Sequence
  Synthetic
ggucucugcugaagaaccu

SEQ ID NO: 4862 - RNA, 19 nt, Artificial Sequence
  Synthetic
acauauccaaugaugauga

SEQ ID NO: 4863 - RNA, 19 nt, Artificial Sequence
  Synthetic
ggaguacaguggcgugauc

SEQ ID NO: 4864 - RNA, 19 nt, Artificial Sequence
  Synthetic
ccaccaaucucuauaaaac

SEQ ID NO: 4865 - RNA, 19 nt, Artificial Sequence
  Synthetic
cugaugagauccuccuuca

SEQ ID NO: 4866 - RNA, 19 nt, Artificial Sequence
  Synthetic
gccaguuucuguuguuuga

SEQ ID NO: 4867 - RNA, 19 nt, Artificial Sequence
  Synthetic
ucaacaacccguucuacuu

SEQ ID NO: 4868 - RNA, 19 nt, Artificial Sequence
  Synthetic
ucuggucucugcugaagaa

SEQ ID NO: 4869 - RNA, 19 nt, Artificial Sequence
  Synthetic
cgaccgcacuccucagaac

SEQ ID NO: 4870 - RNA, 19 nt, Artificial Sequence
  Synthetic
ggagaggacauauccaaug

SEQ ID NO: 4871 - RNA, 19 nt, Artificial Sequence
  Synthetic
ggagaguauuggaaggaca

SEQ ID NO: 4872 - RNA, 19 nt, Artificial Sequence
  Synthetic
gugaauuguugcagguuuu

SEQ ID NO: 4873 - RNA, 19 nt, Artificial Sequence
  Synthetic
ggauuuacugugaaugaaa

SEQ ID NO: 4874 - RNA, 19 nt, Artificial Sequence
  Synthetic
caacacagggcaaggauau

SEQ ID NO: 4875 - RNA, 19 nt, Artificial Sequence
  Synthetic
ccagcaagacuuagacuau

SEQ ID NO: 4876 - RNA, 19 nt, Artificial Sequence
  Synthetic
auaagaaacuucagugcuu

SEQ ID NO: 4877 - RNA, 19 nt, Artificial Sequence
  Synthetic
ccacagaucaggagcacca

SEQ ID NO: 4878 - RNA, 19 nt, Artificial Sequence
  Synthetic
gggcaaggauauagaugcu

SEQ ID NO: 4879 - RNA, 19 nt, Artificial Sequence
  Synthetic
gcaaggauauagaugcuuu

SEQ ID NO: 4880 - RNA, 19 nt, Artificial Sequence
  Synthetic
agaaggauuuacugugaau

SEQ ID NO: 4881 - RNA, 19 nt, Artificial Sequence
  Synthetic
ugucagagauggauucauu

SEQ ID NO: 4882 - RNA, 19 nt, Artificial Sequence
  Synthetic
ccacaugggagaagcagau

SEQ ID NO: 4883 - RNA, 19 nt, Artificial Sequence
  Synthetic
gcaacacagggcaaggaua

SEQ ID NO: 4884 - RNA, 19 nt, Artificial Sequence
  Synthetic
gcuaagugucagagaugga

SEQ ID NO: 4885 - RNA, 19 nt, Artificial Sequence
  Synthetic
ggugauggaagcuguuuua

SEQ ID NO: 4886 - RNA, 19 nt, Artificial Sequence
  Synthetic
ccaacuucuccuuguauaa

SEQ ID NO: 4887 - RNA, 19 nt, Artificial Sequence
  Synthetic
cuucaaaggucacaaagga

SEQ ID NO: 4888 - RNA, 19 nt, Artificial Sequence
  Synthetic
gaagauauggucagcugaa

SEQ ID NO: 4889 - RNA, 19 nt, Artificial Sequence
  Synthetic
gacucaagauggaaacauu

SEQ ID NO: 4890 - RNA, 19 nt, Artificial Sequence
  Synthetic
gaucaacaaugagcagaaa

SEQ ID NO: 4891 - RNA, 19 nt, Artificial Sequence
  Synthetic
ggauauagaugcuuuuagu

SEQ ID NO: 4892 - RNA, 19 nt, Artificial Sequence
  Synthetic
agagauggauucauugcua

SEQ ID NO: 4893 - RNA, 19 nt, Artificial Sequence
  Synthetic
gaauggaugcccagcugaa

SEQ ID NO: 4894 - RNA, 19 nt, Artificial Sequence
  Synthetic
cagaauucauacaaagagu

SEQ ID NO: 4895 - RNA, 19 nt, Artificial Sequence
  Synthetic
gagcagaugcccagugaac

SEQ ID NO: 4896 - RNA, 19 nt, Artificial Sequence
  Synthetic
gagcagucccgguuaguga

SEQ ID NO: 4897 - RNA, 19 nt, Artificial Sequence
  Synthetic
cuuugaggauucagagcga

SEQ ID NO: 4898 - RNA, 19 nt, Artificial Sequence
  Synthetic
ccuguucucuggaggaaau

SEQ ID NO: 4899 - RNA, 19 nt, Artificial Sequence
  Synthetic
gaauuggccuagauggcau

SEQ ID NO: 4900 - RNA, 19 nt, Artificial Sequence
  Synthetic
gagaguauuggaaggacau

SEQ ID NO: 4901 - RNA, 19 nt, Artificial Sequence
  Synthetic
gaucaaggcugcugggaaa

SEQ ID NO: 4902 - RNA, 19 nt, Artificial Sequence
  Synthetic
ggauaugggauaagaggaa

SEQ ID NO: 4903 - RNA, 19 nt, Artificial Sequence
  Synthetic
uaucaaagacacaaggaaa

SEQ ID NO: 4904 - RNA, 19 nt, Artificial Sequence
  Synthetic
gaucagaccuugagaaugu

SEQ ID NO: 4905 - RNA, 19 nt, Artificial Sequence
  Synthetic
gaaaucaagacgauggaaa

SEQ ID NO: 4906 - RNA, 19 nt, Artificial Sequence
  Synthetic
cuagaaaucuccuggaaga

SEQ ID NO: 4907 - RNA, 19 nt, Artificial Sequence
  Synthetic
gcgcgauggagcagcgaaa

SEQ ID NO: 4908 - RNA, 19 nt, Artificial Sequence
  Synthetic
gaagagaggcagagcacuu

SEQ ID NO: 4909 - RNA, 19 nt, Artificial Sequence
  Synthetic
gagcugaaguguugaaguu

SEQ ID NO: 4910 - RNA, 19 nt, Artificial Sequence
  Synthetic
ggaagaagcccuaaaagaa

SEQ ID NO: 4911 - RNA, 19 nt, Artificial Sequence
  Synthetic
gggaucagaccuugagaau

SEQ ID NO: 4912 - RNA, 19 nt, Artificial Sequence
  Synthetic
ccaguacagcaguggaaua

SEQ ID NO: 4913 - RNA, 19 nt, Artificial Sequence
  Synthetic
cgaaagaucucucgccaga

SEQ ID NO: 4914 - RNA, 19 nt, Artificial Sequence
  Synthetic
ucacaaggcccaugacaau

SEQ ID NO: 4915 - RNA, 19 nt, Artificial Sequence
  Synthetic
gugucaagaugcuggugaa

SEQ ID NO: 4916 - RNA, 19 nt, Artificial Sequence
  Synthetic
ggacacagcccugcagaaa

SEQ ID NO: 4917 - RNA, 19 nt, Artificial Sequence
  Synthetic
cgccagagcaaaugggaca

SEQ ID NO: 4918 - RNA, 19 nt, Artificial Sequence
  Synthetic
gcgaaaacgugguuguaga

SEQ ID NO: 4919 - RNA, 19 nt, Artificial Sequence
  Synthetic
ugggagagcuguacauauu

SEQ ID NO: 4920 - RNA, 19 nt, Artificial Sequence
  Synthetic
gugcaaauccggaauguca

SEQ ID NO: 4921 - RNA, 19 nt, Artificial Sequence
  Synthetic
ucaagaugcuggugaaguu

SEQ ID NO: 4922 - RNA, 19 nt, Artificial Sequence
  Synthetic
cugugaaguucugggauua

SEQ ID NO: 4923 - RNA, 19 nt, Artificial Sequence
  Synthetic
gagcggaaaucaagacgau

SEQ ID NO: 4924 - RNA, 19 nt, Artificial Sequence
  Synthetic
aagaaaugcuauggggaaa

SEQ ID NO: 4925 - RNA, 19 nt, Artificial Sequence
  Synthetic
caggaaacaugucagaaga

SEQ ID NO: 4926 - RNA, 19 nt, Artificial Sequence
  Synthetic
aaaucaagacgauggaaaa

SEQ ID NO: 4927 - RNA, 19 nt, Artificial Sequence
  Synthetic
ucugugaaguucugggauu

SEQ ID NO: 4928 - RNA, 19 nt, Artificial Sequence
  Synthetic
agaccuugcagcaggaauu

SEQ ID NO: 4929 - RNA, 19 nt, Artificial Sequence
  Synthetic
ggaaacaugucagaagaau

SEQ ID NO: 4930 - RNA, 19 nt, Artificial Sequence
  Synthetic
cauauuagaugguguugau

SEQ ID NO: 4931 - RNA, 19 nt, Artificial Sequence
  Synthetic
ggaaggaaggaaagaucaa

SEQ ID NO: 4932 - RNA, 19 nt, Artificial Sequence
  Synthetic
gaucaagaacauggagaaa

SEQ ID NO: 4933 - RNA, 19 nt, Artificial Sequence
  Synthetic
cgaucaagaacauggagaa

SEQ ID NO: 4934 - RNA, 19 nt, Artificial Sequence
  Synthetic
uagaagggaaggaaggaaa

SEQ ID NO: 4935 - RNA, 19 nt, Artificial Sequence
  Synthetic
gagcagggacauaaaggaa

SEQ ID NO: 4936 - RNA, 19 nt, Artificial Sequence
  Synthetic
ccgcaagugucuggugaaa

SEQ ID NO: 4937 - RNA, 19 nt, Artificial Sequence
  Synthetic
gaggagggcuaguucuaua

SEQ ID NO: 4938 - RNA, 19 nt, Artificial Sequence
  Synthetic
gcagggacauaaaggaaaa

SEQ ID NO: 4939 - RNA, 19 nt, Artificial Sequence
  Synthetic
ggaaccaggcacagaguga

SEQ ID NO: 4940 - RNA, 19 nt, Artificial Sequence
  Synthetic
gggagaaaguuacauauuu

SEQ ID NO: 4941 - RNA, 19 nt, Artificial Sequence
  Synthetic
gauccgagccuccggcaaa

SEQ ID NO: 4942 - RNA, 19 nt, Artificial Sequence
  Synthetic
gauacgaaaucuccagaau

SEQ ID NO: 4943 - RNA, 19 nt, Artificial Sequence
  Synthetic
cagaagagcagggacauaa

SEQ ID NO: 4944 - RNA, 19 nt, Artificial Sequence
  Synthetic
ggaaggaaagaucaaggaa

SEQ ID NO: 4945 - RNA, 19 nt, Artificial Sequence
  Synthetic
uggaugagcuggugugagu

SEQ ID NO: 4946 - RNA, 19 nt, Artificial Sequence
  Synthetic
aggcacagagugaucgaua

SEQ ID NO: 4947 - RNA, 19 nt, Artificial Sequence
  Synthetic
agggcuaguucuauacuua

SEQ ID NO: 4948 - RNA, 19 nt, Artificial Sequence
  Synthetic
gccaagaaguuacaauuau

SEQ ID NO: 4949 - RNA, 19 nt, Artificial Sequence
  Synthetic
gggaaggaaggaaagauca

SEQ ID NO: 4950 - RNA, 19 nt, Artificial Sequence
  Synthetic
gcaagugucuggugaaaug

SEQ ID NO: 4951 - RNA, 19 nt, Artificial Sequence
  Synthetic
ggugggagaaaguuacaua

SEQ ID NO: 4952 - RNA, 19 nt, Artificial Sequence
  Synthetic
agaagagcagggacauaaa

SEQ ID NO: 4953 - RNA, 19 nt, Artificial Sequence
  Synthetic
ggaaagaucaaggaaccaa

SEQ ID NO: 4954 - RNA, 19 nt, Artificial Sequence
  Synthetic
agagugaucgauacggaua

SEQ ID NO: 4955 - RNA, 19 nt, Artificial Sequence
  Synthetic
cgagggaggcucuguauga

SEQ ID NO: 4956 - RNA, 19 nt, Artificial Sequence
  Synthetic
ugagggugggagaaaguua

SEQ ID NO: 4957 - RNA, 19 nt, Artificial Sequence
  Synthetic
ccgaugaugucaaugaaua

SEQ ID NO: 4958 - RNA, 19 nt, Artificial Sequence
  Synthetic
aggagaagaugcuggacau

SEQ ID NO: 4959 - RNA, 19 nt, Artificial Sequence
  Synthetic
cuacagugcucucaagaau

SEQ ID NO: 4960 - RNA, 19 nt, Artificial Sequence
  Synthetic
cugcagagcuaugcggauu

SEQ ID NO: 4961 - RNA, 19 nt, Artificial Sequence
  Synthetic
gcacaacaucauagaacaa

SEQ ID NO: 4962 - RNA, 19 nt, Artificial Sequence
  Synthetic
ccauuaagcugaugaacau

SEQ ID NO: 4963 - RNA, 19 nt, Artificial Sequence
  Synthetic
ggacagauggggugaaaua

SEQ ID NO: 4964 - RNA, 19 nt, Artificial Sequence
  Synthetic
gcucuagagaagauggaaa

SEQ ID NO: 4965 - RNA, 19 nt, Artificial Sequence
  Synthetic
cagacuucauacagagaaa

SEQ ID NO: 4966 - RNA, 19 nt, Artificial Sequence
  Synthetic
ucauagaacaaaagggaaa

SEQ ID NO: 4967 - RNA, 19 nt, Artificial Sequence
  Synthetic
ccaucugucuggagaagua

SEQ ID NO: 4968 - RNA, 19 nt, Artificial Sequence
  Synthetic
gaagaggacuuguaugaau

SEQ ID NO: 4969 - RNA, 19 nt, Artificial Sequence
  Synthetic
agaaguacauugauggaga

SEQ ID NO: 4970 - RNA, 19 nt, Artificial Sequence
  Synthetic
agucagaauuccaugaaca

SEQ ID NO: 4971 - RNA, 19 nt, Artificial Sequence
  Synthetic
acgaagaggacuuguauga

SEQ ID NO: 4972 - RNA, 19 nt, Artificial Sequence
  Synthetic
ccacugggccuauguaaua

SEQ ID NO: 4973 - RNA, 19 nt, Artificial Sequence
  Synthetic
aagaggacuuguaugaaua

SEQ ID NO: 4974 - RNA, 19 nt, Artificial Sequence
  Synthetic
gggugaaauacgagggucu

SEQ ID NO: 4975 - RNA, 19 nt, Artificial Sequence
  Synthetic
guaauaacaaugacgaaga

SEQ ID NO: 4976 - RNA, 19 nt, Artificial Sequence
  Synthetic
gcugcuacacugaggacua

SEQ ID NO: 4977 - RNA, 19 nt, Artificial Sequence
  Synthetic
gagaugaacuacagcagca

SEQ ID NO: 4978 - RNA, 19 nt, Artificial Sequence
  Synthetic
ggguaggaguggugaagcu

SEQ ID NO: 4979 - RNA, 19 nt, Artificial Sequence
  Synthetic
cagaaaguggcucgagcaa

SEQ ID NO: 4980 - RNA, 19 nt, Artificial Sequence
  Synthetic
gggccuauguaauaacaau

SEQ ID NO: 4981 - RNA, 19 nt, Artificial Sequence
  Synthetic
guacauugauggagaggag

SEQ ID NO: 4982 - RNA, 19 nt, Artificial Sequence
  Synthetic
ucaagaggccgguggugua

SEQ ID NO: 4983 - RNA, 19 nt, Artificial Sequence
  Synthetic
acaaugacgaagaggacuu

SEQ ID NO: 4984 - RNA, 19 nt, Artificial Sequence
  Synthetic
agaagauggaaaccagaaa

SEQ ID NO: 4985 - RNA, 19 nt, Artificial Sequence
  Synthetic
ccugcagccuggagaugaa

SEQ ID NO: 4986 - RNA, 19 nt, Artificial Sequence
  Synthetic
gagaagauggaaaccagaa

SEQ ID NO: 4987 - RNA, 19 nt, Artificial Sequence
  Synthetic
guaugaauauggcugggua

SEQ ID NO: 4988 - RNA, 19 nt, Artificial Sequence
  Synthetic
cugucauccuauugcuaaa

SEQ ID NO: 4989 - RNA, 19 nt, Artificial Sequence
  Synthetic
gccauuaagcugaugaaca

SEQ ID NO: 4990 - RNA, 19 nt, Artificial Sequence
  Synthetic
cagaggauguggacuguga

SEQ ID NO: 4991 - RNA, 19 nt, Artificial Sequence
  Synthetic
gcaacagauugaagagaga

SEQ ID NO: 4992 - RNA, 19 nt, Artificial Sequence
  Synthetic
ggugaagauuuaaagagua

SEQ ID NO: 4993 - RNA, 19 nt, Artificial Sequence
  Synthetic
aggcaggagucgagcguca

SEQ ID NO: 4994 - RNA, 19 nt, Artificial Sequence
  Synthetic
gggugaagauuuaaagagu

SEQ ID NO: 4995 - RNA, 19 nt, Artificial Sequence
  Synthetic
gcucaaagaucauucauca

SEQ ID NO: 4996 - RNA, 19 nt, Artificial Sequence
  Synthetic
gggaggaauuggguagaaa

SEQ ID NO: 4997 - RNA, 19 nt, Artificial Sequence
  Synthetic
ucauuugggugaagauuua

SEQ ID NO: 4998 - RNA, 19 nt, Artificial Sequence
  Synthetic
gugaacagcaggaauuaaa

SEQ ID NO: 4999 - RNA, 19 nt, Artificial Sequence
  Synthetic
gcuuugacaucuuggugua

SEQ ID NO: 5000 - RNA, 19 nt, Artificial Sequence
  Synthetic
ccaaacaaggcaugcagua

SEQ ID NO: 5001 - RNA, 19 nt, Artificial Sequence
  Synthetic
guacaacagcuaauaguuu

SEQ ID NO: 5002 - RNA, 19 nt, Artificial Sequence
  Synthetic
gaagagagaucaugugaag

SEQ ID NO: 5003 - RNA, 19 nt, Artificial Sequence
  Synthetic
uggaaugauugcucaaaga

SEQ ID NO: 5004 - RNA, 19 nt, Artificial Sequence
  Synthetic
gaaaaugccucaucacuua

SEQ ID NO: 5005 - RNA, 19 nt, Artificial Sequence
  Synthetic
ggaauuggguagaaacucu

SEQ ID NO: 5006 - RNA, 19 nt, Artificial Sequence
  Synthetic
uucagaagcuccaggaaaa

SEQ ID NO: 5007 - RNA, 19 nt, Artificial Sequence
  Synthetic
aggaggaguuccaggagca

SEQ ID NO: 5008 - RNA, 19 nt, Artificial Sequence
  Synthetic
gagccaagccugaggacag

SEQ ID NO: 5009 - RNA, 19 nt, Artificial Sequence
  Synthetic
uccaagagaccgaggagau

SEQ ID NO: 5010 - RNA, 19 nt, Artificial Sequence
  Synthetic
ggaccaacacagugcccuu

SEQ ID NO: 5011 - RNA, 19 nt, Artificial Sequence
  Synthetic
caggaaaaugcgugccuua

SEQ ID NO: 5012 - RNA, 19 nt, Artificial Sequence
  Synthetic
aagaaacgcuuaacagcca

SEQ ID NO: 5013 - RNA, 19 nt, Artificial Sequence
  Synthetic
agaccgaggagaugcugaa

SEQ ID NO: 5014 - RNA, 19 nt, Artificial Sequence
  Synthetic
gaacccaagaagugcccua

SEQ ID NO: 5015 - RNA, 19 nt, Artificial Sequence
  Synthetic
ugacacuucaggagcacaa

SEQ ID NO: 5016 - RNA, 19 nt, Artificial Sequence
  Synthetic
acagccaguuuguggaaaa

SEQ ID NO: 5017 - RNA, 19 nt, Artificial Sequence
  Synthetic
ccucacagcuuccuugcaa

SEQ ID NO: 5018 - RNA, 19 nt, Artificial Sequence
  Synthetic
ccgaggagaugcugaaggu

SEQ ID NO: 5019 - RNA, 19 nt, Artificial Sequence
  Synthetic
gugcggucuguuaaagaaa

SEQ ID NO: 5020 - RNA, 19 nt, Artificial Sequence
  Synthetic
cagcaggaauuaaacaugu

SEQ ID NO: 5021 - RNA, 19 nt, Artificial Sequence
  Synthetic
gauaaguggaagauggaaa

SEQ ID NO: 5022 - RNA, 19 nt, Artificial Sequence
  Synthetic
gugacaugauggaaggaaa

SEQ ID NO: 5023 - RNA, 19 nt, Artificial Sequence
  Synthetic
gauguaagacagaagguaa

SEQ ID NO: 5024 - RNA, 19 nt, Artificial Sequence
  Synthetic
gcuuugaacaggagagaca

SEQ ID NO: 5025 - RNA, 19 nt, Artificial Sequence
  Synthetic
aaucuugaguugaggaaau

SEQ ID NO: 5026 - RNA, 19 nt, Artificial Sequence
  Synthetic
gggaaagucugcuugagua

SEQ ID NO: 5027 - RNA, 19 nt, Artificial Sequence
  Synthetic
gcaauaacacagugagguu

SEQ ID NO: 5028 - RNA, 19 nt, Artificial Sequence
  Synthetic
gcacaggagucaaagagau

SEQ ID NO: 5029 - RNA, 19 nt, Artificial Sequence
  Synthetic
ggaaagucugcuugaguau

SEQ ID NO: 5030 - RNA, 19 nt, Artificial Sequence
  Synthetic
caugggagccugaggguuu

SEQ ID NO: 5031 - RNA, 19 nt, Artificial Sequence
  Synthetic
agaaagugcuggagaggcu

SEQ ID NO: 5032 - RNA, 19 nt, Artificial Sequence
  Synthetic
aguccuuucuggaguauua

SEQ ID NO: 5033 - RNA, 19 nt, Artificial Sequence
  Synthetic
ggacagagacagaccuuca

SEQ ID NO: 5034 - RNA, 19 nt, Artificial Sequence
  Synthetic
ccauaaugagaaugcagaa

SEQ ID NO: 5035 - RNA, 19 nt, Artificial Sequence
  Synthetic
ggccagcuccuuagggaua

SEQ ID NO: 5036 - RNA, 19 nt, Artificial Sequence
  Synthetic
gggcuguccuuguguauuu

SEQ ID NO: 5037 - RNA, 19 nt, Artificial Sequence
  Synthetic
aauaacacagugagguuua

SEQ ID NO: 5038 - RNA, 19 nt, Artificial Sequence
  Synthetic
gaauagucucuuacagauu

SEQ ID NO: 5039 - RNA, 19 nt, Artificial Sequence
  Synthetic
ugacuaagauucaugcauu

SEQ ID NO: 5040 - RNA, 19 nt, Artificial Sequence
  Synthetic
guauuuagcugcagugauc

SEQ ID NO: 5041 - RNA, 19 nt, Artificial Sequence
  Synthetic
gaacagugguggagucuag

SEQ ID NO: 5042 - RNA, 19 nt, Artificial Sequence
  Synthetic
agacagaagguaaauguga

SEQ ID NO: 5043 - RNA, 19 nt, Artificial Sequence
  Synthetic
cuugaguauucuagguaca

SEQ ID NO: 5044 - RNA, 19 nt, Artificial Sequence
  Synthetic
cauaaugagaaugcagaaa

SEQ ID NO: 5045 - RNA, 19 nt, Artificial Sequence
  Synthetic
cgucagaaagugcuggaga

SEQ ID NO: 5046 - RNA, 19 nt, Artificial Sequence
  Synthetic
gggagaggauaguguguac

SEQ ID NO: 5047 - RNA, 19 nt, Artificial Sequence
  Synthetic
ggauuagagccacuacaua

SEQ ID NO: 5048 - RNA, 19 nt, Artificial Sequence
  Synthetic
gggauaucauguccauuua

SEQ ID NO: 5049 - RNA, 19 nt, Artificial Sequence
  Synthetic
ggagagacauccaggagac

SEQ ID NO: 5050 - RNA, 19 nt, Artificial Sequence
  Synthetic
cuucuaccgcaaugggaaa

SEQ ID NO: 5051 - RNA, 19 nt, Artificial Sequence
  Synthetic
acaaauacaucauggguga

SEQ ID NO: 5052 - RNA, 19 nt, Artificial Sequence
  Synthetic
gugcagguguguaaggaaa

SEQ ID NO: 5053 - RNA, 19 nt, Artificial Sequence
  Synthetic
ugaaagugcagguguguaa

SEQ ID NO: 5054 - RNA, 19 nt, Artificial Sequence
  Synthetic
agaaauuggagcuggagaa

SEQ ID NO: 5055 - RNA, 19 nt, Artificial Sequence
  Synthetic
ggagaagauugaugaaagu

SEQ ID NO: 5056 - RNA, 19 nt, Artificial Sequence
  Synthetic
ggaugaagguggcgucuuu

SEQ ID NO: 5057 - RNA, 19 nt, Artificial Sequence
  Synthetic
aauuggagcuggagaagau

SEQ ID NO: 5058 - RNA, 19 nt, Artificial Sequence
  Synthetic
aaucagguguuaaggaaga

SEQ ID NO: 5059 - RNA, 19 nt, Artificial Sequence
  Synthetic
ggucagugcuggucaucuu

SEQ ID NO: 5060 - RNA, 19 nt, Artificial Sequence
  Synthetic
ugaaucagguguuaaggaa

SEQ ID NO: 5061 - RNA, 19 nt, Artificial Sequence
  Synthetic
gaaccaaggaaacuaacaa

SEQ ID NO: 5062 - RNA, 19 nt, Artificial Sequence
  Synthetic
acaagaaauuggagcugga

SEQ ID NO: 5063 - RNA, 19 nt, Artificial Sequence
  Synthetic
ggaaaguucuaucugguca

SEQ ID NO: 5064 - RNA, 19 nt, Artificial Sequence
  Synthetic
ucauauuccugaagcccaa

SEQ ID NO: 5065 - RNA, 19 nt, Artificial Sequence
  Synthetic
caauguagguuacuaguga

SEQ ID NO: 5066 - RNA, 19 nt, Artificial Sequence
  Synthetic
gggagucagaccuggaauu

SEQ ID NO: 5067 - RNA, 19 nt, Artificial Sequence
  Synthetic
ggauaacauuccaccugaa

SEQ ID NO: 5068 - RNA, 19 nt, Artificial Sequence
  Synthetic
gacggaacccaguguauua

SEQ ID NO: 5069 - RNA, 19 nt, Artificial Sequence
  Synthetic
uggagaagauugaugaaag

SEQ ID NO: 5070 - RNA, 19 nt, Artificial Sequence
  Synthetic
gcacagaagcuggugacau

SEQ ID NO: 5071 - RNA, 19 nt, Artificial Sequence
  Synthetic
caaggaaacuaacaaugua

SEQ ID NO: 5072 - RNA, 19 nt, Artificial Sequence
  Synthetic
ccaaugguuucuccaauua

SEQ ID NO: 5073 - RNA, 19 nt, Artificial Sequence
  Synthetic
gcagguguguaaggaaaua

SEQ ID NO: 5074 - RNA, 19 nt, Artificial Sequence
  Synthetic
gugaauaccccaaugguuu

SEQ ID NO: 5075 - RNA, 19 nt, Artificial Sequence
  Synthetic
guagguuacuagugaauac

SEQ ID NO: 5076 - RNA, 19 nt, Artificial Sequence
  Synthetic
cacagaagcuggugacauc

SEQ ID NO: 5077 - RNA, 19 nt, Artificial Sequence
  Synthetic
gcagcaacacggauaacau

SEQ ID NO: 5078 - RNA, 19 nt, Artificial Sequence
  Synthetic
aguccaagggaaaguucua

SEQ ID NO: 5079 - RNA, 19 nt, Artificial Sequence
  Synthetic
cggcugugauugcugaauu

SEQ ID NO: 5080 - RNA, 19 nt, Artificial Sequence
  Synthetic
cagcugugguacaaauaca

SEQ ID NO: 5081 - RNA, 19 nt, Artificial Sequence
  Synthetic
gcaccuggccagagugaaa

SEQ ID NO: 5082 - RNA, 19 nt, Artificial Sequence
  Synthetic
cagccugggucaagaauua

SEQ ID NO: 5083 - RNA, 19 nt, Artificial Sequence
  Synthetic
ugaugaaaguauugcagua

SEQ ID NO: 5084 - RNA, 19 nt, Artificial Sequence
  Synthetic
guagaauagaacuggaauu

SEQ ID NO: 5085 - RNA, 19 nt, Artificial Sequence
  Synthetic
acacaaacuacuugaacau

SEQ ID NO: 5086 - RNA, 19 nt, Artificial Sequence
  Synthetic
gggagaggauggacaggau

SEQ ID NO: 5087 - RNA, 19 nt, Artificial Sequence
  Synthetic
gcaccaagacccugcaaca

SEQ ID NO: 5088 - RNA, 19 nt, Artificial Sequence
  Synthetic
gagcagaaacacagccaca

SEQ ID NO: 5089 - RNA, 19 nt, Artificial Sequence
  Synthetic
ggaugaaguaagugcaaac

SEQ ID NO: 5090 - RNA, 19 nt, Artificial Sequence
  Synthetic
ggauggacaggaugaagua

SEQ ID NO: 5091 - RNA, 19 nt, Artificial Sequence
  Synthetic
acaaacuacuugaacauga

SEQ ID NO: 5092 - RNA, 19 nt, Artificial Sequence
  Synthetic
gagaggauggacaggauga

SEQ ID NO: 5093 - RNA, 19 nt, Artificial Sequence
  Synthetic
caggaugaaguaagugcaa

SEQ ID NO: 5094 - RNA, 19 nt, Artificial Sequence
  Synthetic
cagcaugccuucugcgcca

SEQ ID NO: 5095 - RNA, 19 nt, Artificial Sequence
  Synthetic
gacacaaacuacuugaaca

SEQ ID NO: 5096 - RNA, 19 nt, Artificial Sequence
  Synthetic
cagcuuggugggagaggau

SEQ ID NO: 5097 - RNA, 19 nt, Artificial Sequence
  Synthetic
gaauuacacgcuuggauga

SEQ ID NO: 5098 - RNA, 19 nt, Artificial Sequence
  Synthetic
aggaugaaguaagugcaaa

SEQ ID NO: 5099 - RNA, 19 nt, Artificial Sequence
  Synthetic
gaugaaaguauugcaguau

SEQ ID NO: 5100 - RNA, 19 nt, Artificial Sequence
  Synthetic
ugaaaguauugcaguauug

SEQ ID NO: 5101 - RNA, 19 nt, Artificial Sequence
  Synthetic
gagcagacacaaacuacuu

SEQ ID NO: 5102 - RNA, 19 nt, Artificial Sequence
  Synthetic
uggacaggaugaaguaagu

SEQ ID NO: 5103 - RNA, 19 nt, Artificial Sequence
  Synthetic
uugaugccauuguagaaua

SEQ ID NO: 5104 - RNA, 19 nt, Artificial Sequence
  Synthetic
agaauggccugcaccaaga

SEQ ID NO: 5105 - RNA, 19 nt, Artificial Sequence
  Synthetic
cugcuggccuugcucauua

SEQ ID NO: 5106 - RNA, 19 nt, Artificial Sequence
  Synthetic
gacaacaccugguccauca

SEQ ID NO: 5107 - RNA, 19 nt, Artificial Sequence
  Synthetic
caguauugaugccauugua

SEQ ID NO: 5108 - RNA, 19 nt, Artificial Sequence
  Synthetic
gggcagauuccauccaagu

SEQ ID NO: 5109 - RNA, 19 nt, Artificial Sequence
  Synthetic
gacuggcuccuuugggaaa

SEQ ID NO: 5110 - RNA, 19 nt, Artificial Sequence
  Synthetic
gacuaagacuggcuccuuu

SEQ ID NO: 5111 - RNA, 19 nt, Artificial Sequence
  Synthetic
ugaaauaacuccagcagaa

SEQ ID NO: 5112 - RNA, 19 nt, Artificial Sequence
  Synthetic
ggcacuauguuaagaaaua

SEQ ID NO: 5113 - RNA, 19 nt, Artificial Sequence
  Synthetic
gguagaaaaggcagaauua

SEQ ID NO: 5114 - RNA, 19 nt, Artificial Sequence
  Synthetic
cugagaagcugauggaguu

SEQ ID NO: 5115 - RNA, 19 nt, Artificial Sequence
  Synthetic
cagcaguggaucuggagaa

SEQ ID NO: 5116 - RNA, 19 nt, Artificial Sequence
  Synthetic
gagguagaaaggaggaauu

SEQ ID NO: 5117 - RNA, 19 nt, Artificial Sequence
  Synthetic
ggagaaagcuauugcacag

SEQ ID NO: 5118 - RNA, 19 nt, Artificial Sequence
  Synthetic
ccaagaaccaggucgaaga

SEQ ID NO: 5119 - RNA, 19 nt, Artificial Sequence
  Synthetic
gaaucaggcacuauguuaa

SEQ ID NO: 5120 - RNA, 19 nt, Artificial Sequence
  Synthetic
gcugagaagcugauggagu

SEQ ID NO: 5121 - RNA, 19 nt, Artificial Sequence
  Synthetic
caaaaggaccaguagcaua

SEQ ID NO: 5122 - RNA, 19 nt, Artificial Sequence
  Synthetic
ggaaaggaccacagcaaac

SEQ ID NO: 5123 - RNA, 19 nt, Artificial Sequence
  Synthetic
caguaaggcugcuacauca

SEQ ID NO: 5124 - RNA, 19 nt, Artificial Sequence
  Synthetic
gcaccaucuuugugaucau

SEQ ID NO: 5125 - RNA, 19 nt, Artificial Sequence
  Synthetic
gcacccagcuugccagauu

SEQ ID NO: 5126 - RNA, 19 nt, Artificial Sequence
  Synthetic
ggguaaugacgcugagaag

SEQ ID NO: 5127 - RNA, 19 nt, Artificial Sequence
  Synthetic
cagcagcgguggagucuga

SEQ ID NO: 5128 - RNA, 19 nt, Artificial Sequence
  Synthetic
ccaucugucuggaggaguu

SEQ ID NO: 5129 - RNA, 19 nt, Artificial Sequence
  Synthetic
aagaucagcagaacagaaa

SEQ ID NO: 5130 - RNA, 19 nt, Artificial Sequence
  Synthetic
aggaggaacucgaggagcu

SEQ ID NO: 5131 - RNA, 19 nt, Artificial Sequence
  Synthetic
gaucugagaaccugcauuu

SEQ ID NO: 5132 - RNA, 19 nt, Artificial Sequence
  Synthetic
ucaacaucacagagggaga

SEQ ID NO: 5133 - RNA, 19 nt, Artificial Sequence
  Synthetic
gccaguggguucagcagaa

SEQ ID NO: 5134 - RNA, 19 nt, Artificial Sequence
  Synthetic
caucacagagggagauuca

SEQ ID NO: 5135 - RNA, 19 nt, Artificial Sequence
  Synthetic
gcucagaggaggaacucga

SEQ ID NO: 5136 - RNA, 19 nt, Artificial Sequence
  Synthetic
augugaggauugagcugaa

SEQ ID NO: 5137 - RNA, 19 nt, Artificial Sequence
  Synthetic
ccacauggguauuuauauc

SEQ ID NO: 5138 - RNA, 19 nt, Artificial Sequence
  Synthetic
gaagaggacuggugauggu

SEQ ID NO: 5139 - RNA, 19 nt, Artificial Sequence
  Synthetic
cagauuaugauguguggau

SEQ ID NO: 5140 - RNA, 19 nt, Artificial Sequence
  Synthetic
ggguugagaauaagaauag

SEQ ID NO: 5141 - RNA, 19 nt, Artificial Sequence
  Synthetic
agaaagagauguugagaau

SEQ ID NO: 5142 - RNA, 19 nt, Artificial Sequence
  Synthetic
ccuaauaaauacggagaaa

SEQ ID NO: 5143 - RNA, 19 nt, Artificial Sequence
  Synthetic
gcagagaggcaaagaagaa

SEQ ID NO: 5144 - RNA, 19 nt, Artificial Sequence
  Synthetic
caaagaagggcgagacuau

SEQ ID NO: 5145 - RNA, 19 nt, Artificial Sequence
  Synthetic
ucaaagaacuugucucuaa

SEQ ID NO: 5146 - RNA, 19 nt, Artificial Sequence
  Synthetic
aaguaaaccuggugacuca

SEQ ID NO: 5147 - RNA, 19 nt, Artificial Sequence
  Synthetic
guuggaaacgaguguaaua

SEQ ID NO: 5148 - RNA, 19 nt, Artificial Sequence
  Synthetic
aagaaggaguuuaugguuu

SEQ ID NO: 5149 - RNA, 19 nt, Artificial Sequence
  Synthetic
agaagaagaaggaguuuau

SEQ ID NO: 5150 - RNA, 19 nt, Artificial Sequence
  Synthetic
aggcaaggcagcaaauuua

SEQ ID NO: 5151 - RNA, 19 nt, Artificial Sequence
  Synthetic
caaagaagaagaaggaguu

SEQ ID NO: 5152 - RNA, 19 nt, Artificial Sequence
  Synthetic
caacaacaauggaagacau

SEQ ID NO: 5153 - RNA, 19 nt, Artificial Sequence
  Synthetic
ugaacaaacuaguuagcuu

SEQ ID NO: 5154 - RNA, 19 nt, Artificial Sequence
  Synthetic
uaguauauuuccagggaua

SEQ ID NO: 5155 - RNA, 19 nt, Artificial Sequence
  Synthetic
gcaaauauagauugagcua

SEQ ID NO: 5156 - RNA, 19 nt, Artificial Sequence
  Synthetic
gagcauaggcagacuuaaa

SEQ ID NO: 5157 - RNA, 19 nt, Artificial Sequence
  Synthetic
gagaugaagauuugacuaa

SEQ ID NO: 5158 - RNA, 19 nt, Artificial Sequence
  Synthetic
agaacaagaagaagcauaa

SEQ ID NO: 5159 - RNA, 19 nt, Artificial Sequence
  Synthetic
caguaaugcaugucaauaa

SEQ ID NO: 5160 - RNA, 19 nt, Artificial Sequence
  Synthetic
gguuguaggucauaaagaa

SEQ ID NO: 5161 - RNA, 19 nt, Artificial Sequence
  Synthetic
ggagagagcugauccuuua

SEQ ID NO: 5162 - RNA, 19 nt, Artificial Sequence
  Synthetic
gcagagugcuguaggacau

SEQ ID NO: 5163 - RNA, 19 nt, Artificial Sequence
  Synthetic
gaaaugacugugaagaaua

SEQ ID NO: 5164 - RNA, 19 nt, Artificial Sequence
  Synthetic
cagaacaagaagaagcaua

SEQ ID NO: 5165 - RNA, 19 nt, Artificial Sequence
  Synthetic
ggacagaaguugcuggguu

SEQ ID NO: 5166 - RNA, 19 nt, Artificial Sequence
  Synthetic
gggaguagcugcuugguuu

SEQ ID NO: 5167 - RNA, 19 nt, Artificial Sequence
  Synthetic
gauuuuggcuaaaggauuu

SEQ ID NO: 5168 - RNA, 19 nt, Artificial Sequence
  Synthetic
aaaaguaaauggagaggua

SEQ ID NO: 5169 - RNA, 19 nt, Artificial Sequence
  Synthetic
ggacacauaucuugcaaaa

SEQ ID NO: 5170 - RNA, 19 nt, Artificial Sequence
  Synthetic
ugaaagagaugauguagau

SEQ ID NO: 5171 - RNA, 19 nt, Artificial Sequence
  Synthetic
gacagaaguugcuggguuu

SEQ ID NO: 5172 - RNA, 19 nt, Artificial Sequence
  Synthetic
gugcaaugcugaauaccua

SEQ ID NO: 5173 - RNA, 19 nt, Artificial Sequence
  Synthetic
acuucaaacagcagcaaua

SEQ ID NO: 5174 - RNA, 19 nt, Artificial Sequence
  Synthetic
agacagaaaugcaaagauc

SEQ ID NO: 5175 - RNA, 19 nt, Artificial Sequence
  Synthetic
agaucaaacugugcaaaua

SEQ ID NO: 5176 - RNA, 19 nt, Artificial Sequence
  Synthetic
caagguacuaugaggauuu

SEQ ID NO: 5177 - RNA, 19 nt, Artificial Sequence
  Synthetic
gcugaauaccuaauaguuu

SEQ ID NO: 5178 - RNA, 19 nt, Artificial Sequence
  Synthetic
ugaugaagaugauagaaca

SEQ ID NO: 5179 - RNA, 19 nt, Artificial Sequence
  Synthetic
gcaaauacucgaauaaacu

SEQ ID NO: 5180 - RNA, 19 nt, Artificial Sequence
  Synthetic
gaugaagauuugacuaaca

SEQ ID NO: 5181 - RNA, 19 nt, Artificial Sequence
  Synthetic
gguaaauugauguucagua

SEQ ID NO: 5182 - RNA, 19 nt, Artificial Sequence
  Synthetic
aggauuaacugagagauua

SEQ ID NO: 5183 - RNA, 19 nt, Artificial Sequence
  Synthetic
ggauagaccuggguucaaa

SEQ ID NO: 5184 - RNA, 19 nt, Artificial Sequence
  Synthetic
gaaacaaagugcagacauu

SEQ ID NO: 5185 - RNA, 19 nt, Artificial Sequence
  Synthetic
ugucagaaguacauagaua

SEQ ID NO: 5186 - RNA, 19 nt, Artificial Sequence
  Synthetic
gugcagacauucaaagaaa

SEQ ID NO: 5187 - RNA, 19 nt, Artificial Sequence
  Synthetic
gcaaguagguggaggaucu

SEQ ID NO: 5188 - RNA, 19 nt, Artificial Sequence
  Synthetic
gcagacauucaaagaaaua

SEQ ID NO: 5189 - RNA, 19 nt, Artificial Sequence
  Synthetic
ggaaagcagcuguguguga

SEQ ID NO: 5190 - RNA, 19 nt, Artificial Sequence
  Synthetic
cuaccagucugaagaacaa

SEQ ID NO: 5191 - RNA, 19 nt, Artificial Sequence
  Synthetic
ggagggaaguugucaauga

SEQ ID NO: 5192 - RNA, 19 nt, Artificial Sequence
  Synthetic
agauaaguauggaccacua

SEQ ID NO: 5193 - RNA, 19 nt, Artificial Sequence
  Synthetic
gugauagcuuggaagguuu

SEQ ID NO: 5194 - RNA, 19 nt, Artificial Sequence
  Synthetic
agagggaacuguaugaaga

SEQ ID NO: 5195 - RNA, 19 nt, Artificial Sequence
  Synthetic
caguugagguuucagguuu

SEQ ID NO: 5196 - RNA, 19 nt, Artificial Sequence
  Synthetic
ccacugaauugcaccauuu

SEQ ID NO: 5197 - RNA, 19 nt, Artificial Sequence
  Synthetic
cauuuaagaugcugcuuga

SEQ ID NO: 5198 - RNA, 19 nt, Artificial Sequence
  Synthetic
gucagaaguacauagauaa

SEQ ID NO: 5199 - RNA, 19 nt, Artificial Sequence
  Synthetic
uaacagagcuagacuccau

SEQ ID NO: 5200 - RNA, 19 nt, Artificial Sequence
  Synthetic
cccaauaccacaagacaga

SEQ ID NO: 5201 - RNA, 19 nt, Artificial Sequence
  Synthetic
uaugggaguuggaaaggaa

SEQ ID NO: 5202 - RNA, 19 nt, Artificial Sequence
  Synthetic
cuccaaugcucuuguucua

SEQ ID NO: 5203 - RNA, 19 nt, Artificial Sequence
  Synthetic
gagcuagacuccaucucaa

SEQ ID NO: 5204 - RNA, 19 nt, Artificial Sequence
  Synthetic
agucaagaaaguccauuua

SEQ ID NO: 5205 - RNA, 19 nt, Artificial Sequence
  Synthetic
ugaaaugagggcacauauu

SEQ ID NO: 5206 - RNA, 19 nt, Artificial Sequence
  Synthetic
cagcaaaauucaagaacaa

SEQ ID NO: 5207 - RNA, 19 nt, Artificial Sequence
  Synthetic
guucagcgguggaaagauu

SEQ ID NO: 5208 - RNA, 19 nt, Artificial Sequence
  Synthetic
ccucaucaacucugacaua

SEQ ID NO: 5209 - RNA, 19 nt, Artificial Sequence
  Synthetic
gaacaaaacugcuccaaca

SEQ ID NO: 5210 - RNA, 19 nt, Artificial Sequence
  Synthetic
auguguaucuugaaagcua

SEQ ID NO: 5211 - RNA, 19 nt, Artificial Sequence
  Synthetic
ccaugaggaugaccagcaa

SEQ ID NO: 5212 - RNA, 19 nt, Artificial Sequence
  Synthetic
caugguuuguggcggaaga

SEQ ID NO: 5213 - RNA, 19 nt, Artificial Sequence
  Synthetic
gaggaugaccagcaaaauu

SEQ ID NO: 5214 - RNA, 19 nt, Artificial Sequence
  Synthetic
gcgaacaggacaucuacga

SEQ ID NO: 5215 - RNA, 19 nt, Artificial Sequence
  Synthetic
ugacauagugugcgaacag

SEQ ID NO: 5216 - RNA, 19 nt, Artificial Sequence
  Synthetic
caagaugcgagucugguuu

SEQ ID NO: 5217 - RNA, 19 nt, Artificial Sequence
  Synthetic
gcuacggacaguuugcuuu

SEQ ID NO: 5218 - RNA, 19 nt, Artificial Sequence
  Synthetic
gagaacgccacaagcaacu

SEQ ID NO: 5219 - RNA, 19 nt, Artificial Sequence
  Synthetic
gcaacgagaacgccacaag

SEQ ID NO: 5220 - RNA, 19 nt, Artificial Sequence
  Synthetic
cgaguggacuaagaucaau

SEQ ID NO: 5221 - RNA, 19 nt, Artificial Sequence
  Synthetic
caucacacagcuccucaau

SEQ ID NO: 5222 - RNA, 19 nt, Artificial Sequence
  Synthetic
agaauaggguacagagaua

SEQ ID NO: 5223 - RNA, 19 nt, Artificial Sequence
  Synthetic
gcaaaguauuagugguuga

SEQ ID NO: 5224 - RNA, 19 nt, Artificial Sequence
  Synthetic
ccaaaaugauguugacuua

SEQ ID NO: 5225 - RNA, 19 nt, Artificial Sequence
  Synthetic
ggguguaaccaucaagaaa

SEQ ID NO: 5226 - RNA, 19 nt, Artificial Sequence
  Synthetic
caaaguaugagcaaggaua

SEQ ID NO: 5227 - RNA, 19 nt, Artificial Sequence
  Synthetic
ucaauuaagucaagcugaa

SEQ ID NO: 5228 - RNA, 19 nt, Artificial Sequence
  Synthetic
agacagcucuuucgggaua

SEQ ID NO: 5229 - RNA, 19 nt, Artificial Sequence
  Synthetic
gggaagaguuugcaagaag

SEQ ID NO: 5230 - RNA, 19 nt, Artificial Sequence
  Synthetic
ggaauuucagagaggauuu

SEQ ID NO: 5231 - RNA, 19 nt, Artificial Sequence
  Synthetic
ggaccaaaccaacaagaga

SEQ ID NO: 5232 - RNA, 19 nt, Artificial Sequence
  Synthetic
caacagaggauuugucuca

SEQ ID NO: 5233 - RNA, 19 nt, Artificial Sequence
  Synthetic
gccuaaaccugagaagaaa

SEQ ID NO: 5234 - RNA, 19 nt, Artificial Sequence
  Synthetic
agaaggagauacuuagaca

SEQ ID NO: 5235 - RNA, 19 nt, Artificial Sequence
  Synthetic
gaacagaauucaaaguaug

SEQ ID NO: 5236 - RNA, 19 nt, Artificial Sequence
  Synthetic
gcuuaugcaugaaacaauu

SEQ ID NO: 5237 - RNA, 19 nt, Artificial Sequence
  Synthetic
agacgaagucgccugguua

SEQ ID NO: 5238 - RNA, 19 nt, Artificial Sequence
  Synthetic
agacugaggcaggagaaua

SEQ ID NO: 5239 - RNA, 19 nt, Artificial Sequence
  Synthetic
gauagggaucuaaggauga

SEQ ID NO: 5240 - RNA, 19 nt, Artificial Sequence
  Synthetic
gcaagcugauucacauaua

SEQ ID NO: 5241 - RNA, 19 nt, Artificial Sequence
  Synthetic
gcagaugucagaaaagaaa

SEQ ID NO: 5242 - RNA, 19 nt, Artificial Sequence
  Synthetic
gaauucaaaguaugagcaa

SEQ ID NO: 5243 - RNA, 19 nt, Artificial Sequence
  Synthetic
gagacuauguuucuaagua

SEQ ID NO: 5244 - RNA, 19 nt, Artificial Sequence
  Synthetic
ugaaauuuguccugagucu

SEQ ID NO: 5245 - RNA, 19 nt, Artificial Sequence
  Synthetic
ugaauagugguuagaagua

SEQ ID NO: 5246 - RNA, 19 nt, Artificial Sequence
  Synthetic
aaggagauacuuagacauu

SEQ ID NO: 5247 - RNA, 19 nt, Artificial Sequence
  Synthetic
gaagaacuaaugacagcaa

SEQ ID NO: 5248 - RNA, 19 nt, Artificial Sequence
  Synthetic
ugaaagagaucacccaaca

SEQ ID NO: 5249 - RNA, 19 nt, Artificial Sequence
  Synthetic
gagaauaggguacagagau

SEQ ID NO: 5250 - RNA, 19 nt, Artificial Sequence
  Synthetic
gagaugaccaagccagaau

SEQ ID NO: 5251 - RNA, 19 nt, Artificial Sequence
  Synthetic
cagaagugaucuugaauua

SEQ ID NO: 5252 - RNA, 19 nt, Artificial Sequence
  Synthetic
gauaaagagcucagauaca

SEQ ID NO: 5253 - RNA, 19 nt, Artificial Sequence
  Synthetic
auagcagaguugugaaaua

SEQ ID NO: 5254 - RNA, 19 nt, Artificial Sequence
  Synthetic
ucacaucucuaaaggguaa

SEQ ID NO: 5255 - RNA, 19 nt, Artificial Sequence
  Synthetic
cuugacagaugaugaguaa

SEQ ID NO: 5256 - RNA, 19 nt, Artificial Sequence
  Synthetic
gggaaaaguucaagaauac

SEQ ID NO: 5257 - RNA, 19 nt, Artificial Sequence
  Synthetic
cagaugaccacaagugaaa

SEQ ID NO: 5258 - RNA, 19 nt, Artificial Sequence
  Synthetic
ccaagacaauuaagaacua

SEQ ID NO: 5259 - RNA, 19 nt, Artificial Sequence
  Synthetic
ugacagaugaugaguaauu

SEQ ID NO: 5260 - RNA, 19 nt, Artificial Sequence
  Synthetic
uggauaaagagcucagaua

SEQ ID NO: 5261 - RNA, 19 nt, Artificial Sequence
  Synthetic
ggggaaaaguucaagaaua

SEQ ID NO: 5262 - RNA, 19 nt, Artificial Sequence
  Synthetic
ugauaugcuuugacagcua

SEQ ID NO: 5263 - RNA, 19 nt, Artificial Sequence
  Synthetic
ggacagcggaggaaaucaa

SEQ ID NO: 5264 - RNA, 19 nt, Artificial Sequence
  Synthetic
agaaugauuuccaagacaa

SEQ ID NO: 5265 - RNA, 19 nt, Artificial Sequence
  Synthetic
ggaaaucaagcaaggcaau

SEQ ID NO: 5266 - RNA, 19 nt, Artificial Sequence
  Synthetic
gaaguuugcaagagaauga

SEQ ID NO: 5267 - RNA, 19 nt, Artificial Sequence
  Synthetic
ggaaaugugaaguuugcaa

SEQ ID NO: 5268 - RNA, 19 nt, Artificial Sequence
  Synthetic
acaagugaaaggaggaaaa

SEQ ID NO: 5269 - RNA, 19 nt, Artificial Sequence
  Synthetic
caagcaaggcaaugacaau

SEQ ID NO: 5270 - RNA, 19 nt, Artificial Sequence
  Synthetic
uaaccaagaugccaaauua

SEQ ID NO: 5271 - RNA, 19 nt, Artificial Sequence
  Synthetic
gagaaugauuuccaagaca

SEQ ID NO: 5272 - RNA, 19 nt, Artificial Sequence
  Synthetic
cagaaaauguucggauaua

SEQ ID NO: 5273 - RNA, 19 nt, Artificial Sequence
  Synthetic
ccugaaauugucugcauua

SEQ ID NO: 5274 - RNA, 19 nt, Artificial Sequence
  Synthetic
gaggaugcauauuuugaua

SEQ ID NO: 5275 - RNA, 19 nt, Artificial Sequence
  Synthetic
ugacagaagugaucuugaa

SEQ ID NO: 5276 - RNA, 19 nt, Artificial Sequence
  Synthetic
uagcagaguugugaaauaa

SEQ ID NO: 5277 - RNA, 19 nt, Artificial Sequence
  Synthetic
acuucauaauggagaccaa

SEQ ID NO: 5278 - RNA, 19 nt, Artificial Sequence
  Synthetic
ugaauugcgauguguauua

SEQ ID NO: 5279 - RNA, 19 nt, Artificial Sequence
  Synthetic
aggaaaucaagcaaggcaa

SEQ ID NO: 5280 - RNA, 19 nt, Artificial Sequence
  Synthetic
gggagaaacuacagaugac

SEQ ID NO: 5281 - RNA, 19 nt, Artificial Sequence
  Synthetic
ggcaagaguuggagaagaa

SEQ ID NO: 5282 - RNA, 19 nt, Artificial Sequence
  Synthetic
caggcaucgucgugggaua

SEQ ID NO: 5283 - RNA, 19 nt, Artificial Sequence
  Synthetic
uggaagugauggaaggaau

SEQ ID NO: 5284 - RNA, 19 nt, Artificial Sequence
  Synthetic
gccaugacgacuugaaaua

SEQ ID NO: 5285 - RNA, 19 nt, Artificial Sequence
  Synthetic
caugacgacuugaaauaua

SEQ ID NO: 5286 - RNA, 19 nt, Artificial Sequence
  Synthetic
ggaugggcagggagugaua

SEQ ID NO: 5287 - RNA, 19 nt, Artificial Sequence
  Synthetic
gcagggagugauagccaaa

SEQ ID NO: 5288 - RNA, 19 nt, Artificial Sequence
  Synthetic
ccuuaaaccuguuccuaga

SEQ ID NO: 5289 - RNA, 19 nt, Artificial Sequence
  Synthetic
uggugaagcuccuggaagu

SEQ ID NO: 5290 - RNA, 19 nt, Artificial Sequence
  Synthetic
gggcuugcuucccgaggua

SEQ ID NO: 5291 - RNA, 19 nt, Artificial Sequence
  Synthetic
ccggaaaguugaauaaaug

SEQ ID NO: 5292 - RNA, 19 nt, Artificial Sequence
  Synthetic
uggaaggaauggacaagga

SEQ ID NO: 5293 - RNA, 19 nt, Artificial Sequence
  Synthetic
gggaaggaacuaacauuca

SEQ ID NO: 5294 - RNA, 19 nt, Artificial Sequence
  Synthetic
auaccggaaaguugaauaa

SEQ ID NO: 5295 - RNA, 19 nt, Artificial Sequence
  Synthetic
uggcaagaguuggagaaga

SEQ ID NO: 5296 - RNA, 19 nt, Artificial Sequence
  Synthetic
aaaccuguuccuagagcua

SEQ ID NO: 5297 - RNA, 19 nt, Artificial Sequence
  Synthetic
cagcacggaucuacaucua

SEQ ID NO: 5298 - RNA, 19 nt, Artificial Sequence
  Synthetic
gcgcaguggcaguaucgua

SEQ ID NO: 5299 - RNA, 19 nt, Artificial Sequence
  Synthetic
uaucguagccaaugagguu

SEQ ID NO: 5300 - RNA, 19 nt, Artificial Sequence
  Synthetic
gaauggacaaggagacguu

SEQ ID NO: 5301 - RNA, 19 nt, Artificial Sequence
  Synthetic
accggaaaguugaauaaau

SEQ ID NO: 5302 - RNA, 19 nt, Artificial Sequence
  Synthetic
cauaaaacacuggagguua

SEQ ID NO: 5303 - RNA, 19 nt, Artificial Sequence
  Synthetic
ggaaaguugaauaaaugga

SEQ ID NO: 5304 - RNA, 19 nt, Artificial Sequence
  Synthetic
guucaaguuugggaaggaa

SEQ ID NO: 5305 - RNA, 19 nt, Artificial Sequence
  Synthetic
cagccaugacucacaacua

SEQ ID NO: 5306 - RNA, 19 nt, Artificial Sequence
  Synthetic
cagcuggcauggucaggua

SEQ ID NO: 5307 - RNA, 19 nt, Artificial Sequence
  Synthetic
agccaugacucacaacuaa

SEQ ID NO: 5308 - RNA, 19 nt, Artificial Sequence
  Synthetic
gcaguaucguagccaauga

SEQ ID NO: 5309 - RNA, 19 nt, Artificial Sequence
  Synthetic
gggaggcacugaacaacuu

SEQ ID NO: 5310 - RNA, 19 nt, Artificial Sequence
  Synthetic
gcgcaagcucacccgguuu

SEQ ID NO: 5311 - RNA, 19 nt, Artificial Sequence
  Synthetic
gcuaaguacuuuuggcuau

SEQ ID NO: 5312 - RNA, 19 nt, Artificial Sequence
  Synthetic
gguggaagaauaugugaau

SEQ ID NO: 5313 - RNA, 19 nt, Artificial Sequence
  Synthetic
acacuuacccaguauguua

SEQ ID NO: 5314 - RNA, 19 nt, Artificial Sequence
  Synthetic
gagaucagcuuggcggaaa

SEQ ID NO: 5315 - RNA, 19 nt, Artificial Sequence
  Synthetic
ggaaagaacaagagagcaa

SEQ ID NO: 5316 - RNA, 19 nt, Artificial Sequence
  Synthetic
agagagaaauugaguagaa

SEQ ID NO: 5317 - RNA, 19 nt, Artificial Sequence
  Synthetic
ccggaaaugucauggguuu

SEQ ID NO: 5318 - RNA, 19 nt, Artificial Sequence
  Synthetic
gugcugagcucaugggauu

SEQ ID NO: 5319 - RNA, 19 nt, Artificial Sequence
  Synthetic
gagaaauugaguagaaaga

SEQ ID NO: 5320 - RNA, 19 nt, Artificial Sequence
  Synthetic
gaaggaagcuuuaugaaga

SEQ ID NO: 5321 - RNA, 19 nt, Artificial Sequence
  Synthetic
cugcauaacuacauaaaca

SEQ ID NO: 5322 - RNA, 19 nt, Artificial Sequence
  Synthetic
gcucagugguugacagcau

SEQ ID NO: 5323 - RNA, 19 nt, Artificial Sequence
  Synthetic
guguaucccuugauggaaa

SEQ ID NO: 5324 - RNA, 19 nt, Artificial Sequence
  Synthetic
cagaaaagcccaagccuua

SEQ ID NO: 5325 - RNA, 19 nt, Artificial Sequence
  Synthetic
ugaaagaccaggaagaaga

SEQ ID NO: 5326 - RNA, 19 nt, Artificial Sequence
  Synthetic
gagagaaauugaguagaaa

SEQ ID NO: 5327 - RNA, 19 nt, Artificial Sequence
  Synthetic
ggacagacugaaugguauu

SEQ ID NO: 5328 - RNA, 19 nt, Artificial Sequence
  Synthetic
caagagagcaagaugugaa

SEQ ID NO: 5329 - RNA, 19 nt, Artificial Sequence
  Synthetic
uaauaaagccuccaagcaa

SEQ ID NO: 5330 - RNA, 19 nt, Artificial Sequence
  Synthetic
aaacauugccagauugaau

SEQ ID NO: 5331 - RNA, 19 nt, Artificial Sequence
  Synthetic
gcuuauaauuccuggagaa

SEQ ID NO: 5332 - RNA, 19 nt, Artificial Sequence
  Synthetic
gggagaaggacaaggcaua

SEQ ID NO: 5333 - RNA, 19 nt, Artificial Sequence
  Synthetic
gaacauacucugaggaaca

SEQ ID NO: 5334 - RNA, 19 nt, Artificial Sequence
  Synthetic
acaagaagaggaagagaua

SEQ ID NO: 5335 - RNA, 19 nt, Artificial Sequence
  Synthetic
gcauacagcuuauugauua

SEQ ID NO: 5336 - RNA, 19 nt, Artificial Sequence
  Synthetic
caaaggauauuguaggaua

SEQ ID NO: 5337 - RNA, 19 nt, Artificial Sequence
  Synthetic
agacuuaccugaaggaauu

SEQ ID NO: 5338 - RNA, 19 nt, Artificial Sequence
  Synthetic
aagaaaaccucaaaggaua

SEQ ID NO: 5339 - RNA, 19 nt, Artificial Sequence
  Synthetic
gcucagaggugguggauuc

SEQ ID NO: 5340 - RNA, 19 nt, Artificial Sequence
  Synthetic
gauuagagcuggcaagcau

SEQ ID NO: 5341 - RNA, 19 nt, Artificial Sequence
  Synthetic
ggacaaaucugauccugua

SEQ ID NO: 5342 - RNA, 19 nt, Artificial Sequence
  Synthetic
ggacauggacaauaaagua

SEQ ID NO: 5343 - RNA, 19 nt, Artificial Sequence
  Synthetic
gaacuagccaauaugaaua

SEQ ID NO: 5344 - RNA, 19 nt, Artificial Sequence
  Synthetic
ggacaaggcauacagcuua

SEQ ID NO: 5345 - RNA, 19 nt, Artificial Sequence
  Synthetic
aguauaugauccucagaua

SEQ ID NO: 5346 - RNA, 19 nt, Artificial Sequence
  Synthetic
uguaagcgacuaugagaaa

SEQ ID NO: 5347 - RNA, 19 nt, Artificial Sequence
  Synthetic
gaaauaacauccucucaaa

SEQ ID NO: 5348 - RNA, 19 nt, Artificial Sequence
  Synthetic
acaagagguuauacaagaa

SEQ ID NO: 5349 - RNA, 19 nt, Artificial Sequence
  Synthetic
augaggacauggacaauaa

SEQ ID NO: 5350 - RNA, 19 nt, Artificial Sequence
  Synthetic
cgucagagcuuuuagaauu

SEQ ID NO: 5351 - RNA, 19 nt, Artificial Sequence
  Synthetic
gcgauaauaugaagcuuua

SEQ ID NO: 5352 - RNA, 19 nt, Artificial Sequence
  Synthetic
aggaggagguggaggcaca

SEQ ID NO: 5353 - RNA, 19 nt, Artificial Sequence
  Synthetic
gauuauggauugagauguu

SEQ ID NO: 5354 - RNA, 19 nt, Artificial Sequence
  Synthetic
guaguaagaccuaggauuu

SEQ ID NO: 5355 - RNA, 19 nt, Artificial Sequence
  Synthetic
uggacgaggccaagaggaa

SEQ ID NO: 5356 - RNA, 19 nt, Artificial Sequence
  Synthetic
ggaauuuaguuagagguua

SEQ ID NO: 5357 - RNA, 19 nt, Artificial Sequence
  Synthetic
gucagagcuuuuagaauua

SEQ ID NO: 5358 - RNA, 19 nt, Artificial Sequence
  Synthetic
agaagaaggaggaggugga

SEQ ID NO: 5359 - RNA, 19 nt, Artificial Sequence
  Synthetic
ucugaaagacaguuugaua

SEQ ID NO: 5360 - RNA, 19 nt, Artificial Sequence
  Synthetic
aaaccgaggaauuuaguua

SEQ ID NO: 5361 - RNA, 19 nt, Artificial Sequence
  Synthetic
uagagaaggaccuggaaga

SEQ ID NO: 5362 - RNA, 19 nt, Artificial Sequence
  Synthetic
ccaauuaagugcaaauagu

SEQ ID NO: 5363 - RNA, 19 nt, Artificial Sequence
  Synthetic
gaaggagcaucauggguuu

SEQ ID NO: 5364 - RNA, 19 nt, Artificial Sequence
  Synthetic
guauuuauaagcagaguga

SEQ ID NO: 5365 - RNA, 19 nt, Artificial Sequence
  Synthetic
ccuaaggucaggaguucaa

SEQ ID NO: 5366 - RNA, 19 nt, Artificial Sequence
  Synthetic
gaguguuuaucuaguagua

SEQ ID NO: 5367 - RNA, 19 nt, Artificial Sequence
  Synthetic
agguggaggcacaggugaa

SEQ ID NO: 5368 - RNA, 19 nt, Artificial Sequence
  Synthetic
cuuuauauguguacuguga

SEQ ID NO: 5369 - RNA, 19 nt, Artificial Sequence
  Synthetic
ucggagagcaagugaagga

SEQ ID NO: 5370 - RNA, 19 nt, Artificial Sequence
  Synthetic
gcagagugauuauggauug

SEQ ID NO: 5371 - RNA, 19 nt, Artificial Sequence
  Synthetic
ugaagcagcugcaggagga

SEQ ID NO: 5372 - RNA, 19 nt, Artificial Sequence
  Synthetic
caucuuagcaaugugaaua

SEQ ID NO: 5373 - RNA, 19 nt, Artificial Sequence
  Synthetic
ugucacacguugucaccua

SEQ ID NO: 5374 - RNA, 19 nt, Artificial Sequence
  Synthetic
guacuuaugaaaugagugu

SEQ ID NO: 5375 - RNA, 19 nt, Artificial Sequence
  Synthetic
gagugauuauggauugaga

SEQ ID NO: 5376 - RNA, 19 nt, Artificial Sequence
  Synthetic
gauggaaggagcuaguuuu

SEQ ID NO: 5377 - RNA, 19 nt, Artificial Sequence
  Synthetic
ugaaagacaguuugauacu

SEQ ID NO: 5378 - RNA, 19 nt, Artificial Sequence
  Synthetic
caucauggguuuuguuuuc

SEQ ID NO: 5379 - RNA, 19 nt, Artificial Sequence
  Synthetic
gcguuagaccugcaucuua

SEQ ID NO: 5380 - RNA, 19 nt, Artificial Sequence
  Synthetic
ugacacaagauuagacaaa

SEQ ID NO: 5381 - RNA, 19 nt, Artificial Sequence
  Synthetic
ggacuuaauugauugguau

SEQ ID NO: 5382 - RNA, 19 nt, Artificial Sequence
  Synthetic
gguaaaccaugaagcaaau

SEQ ID NO: 5383 - RNA, 19 nt, Artificial Sequence
  Synthetic
gcucagaugacuaauauua

SEQ ID NO: 5384 - RNA, 19 nt, Artificial Sequence
  Synthetic
ugaaauugcuaaugacaga

SEQ ID NO: 5385 - RNA, 19 nt, Artificial Sequence
  Synthetic
agacgaaacuccuaaucaa

SEQ ID NO: 5386 - RNA, 19 nt, Artificial Sequence
  Synthetic
gagaauuccaggugccuua

SEQ ID NO: 5387 - RNA, 19 nt, Artificial Sequence
  Synthetic
gaauugagguggauguuga

SEQ ID NO: 5388 - RNA, 19 nt, Artificial Sequence
  Synthetic
ccaucuggcuuaugagaga

SEQ ID NO: 5389 - RNA, 19 nt, Artificial Sequence
  Synthetic
gaucuucguucaugaauua

SEQ ID NO: 5390 - RNA, 19 nt, Artificial Sequence
  Synthetic
gaauguacuucaugugauu

SEQ ID NO: 5391 - RNA, 19 nt, Artificial Sequence
  Synthetic
uaucagagauuauggacuu

SEQ ID NO: 5392 - RNA, 19 nt, Artificial Sequence
  Synthetic
gacaauggucauagaagua

SEQ ID NO: 5393 - RNA, 19 nt, Artificial Sequence
  Synthetic
ggaaauuggcccugaugga

SEQ ID NO: 5394 - RNA, 19 nt, Artificial Sequence
  Synthetic
cuaaugacagaguaaguaa

SEQ ID NO: 5395 - RNA, 19 nt, Artificial Sequence
  Synthetic
ggucauugaucuucguuca

SEQ ID NO: 5396 - RNA, 19 nt, Artificial Sequence
  Synthetic
gcgaguacuucuugaaaug

SEQ ID NO: 5397 - RNA, 19 nt, Artificial Sequence
  Synthetic
gaaagugcucagaugacua

SEQ ID NO: 5398 - RNA, 19 nt, Artificial Sequence
  Synthetic
gggccuaguuucuauuaau

SEQ ID NO: 5399 - RNA, 19 nt, Artificial Sequence
  Synthetic
gaacaaaggucgccaguca

SEQ ID NO: 5400 - RNA, 19 nt, Artificial Sequence
  Synthetic
gagcaaaggccuuaugcaa

SEQ ID NO: 5401 - RNA, 19 nt, Artificial Sequence
  Synthetic
ccgugagauuucagaauua

SEQ ID NO: 5402 - RNA, 19 nt, Artificial Sequence
  Synthetic
ggagacagcuugaugagaa

SEQ ID NO: 5403 - RNA, 19 nt, Artificial Sequence
  Synthetic
agacagaccuccggagaaa

SEQ ID NO: 5404 - RNA, 19 nt, Artificial Sequence
  Synthetic
ucaacaagcauuagaacaa

SEQ ID NO: 5405 - RNA, 19 nt, Artificial Sequence
  Synthetic
ccaaagaggugaauugcau

SEQ ID NO: 5406 - RNA, 19 nt, Artificial Sequence
  Synthetic
cggagcagcaugagaaaga

SEQ ID NO: 5407 - RNA, 19 nt, Artificial Sequence
  Synthetic
gagacagcuugaugagaau

SEQ ID NO: 5408 - RNA, 19 nt, Artificial Sequence
  Synthetic
gcagaaucccggugaccua

SEQ ID NO: 5409 - RNA, 19 nt, Artificial Sequence
  Synthetic
gaggcaaggacaagaguga

SEQ ID NO: 5410 - RNA, 19 nt, Artificial Sequence
  Synthetic
ggcaaggacaagagugaga

SEQ ID NO: 5411 - RNA, 19 nt, Artificial Sequence
  Synthetic
acaagggucucuucggaaa

SEQ ID NO: 5412 - RNA, 19 nt, Artificial Sequence
  Synthetic
ccagaaaacucaagaaaug

SEQ ID NO: 5413 - RNA, 19 nt, Artificial Sequence
  Synthetic
gggcggagcagcaugagaa

SEQ ID NO: 5414 - RNA, 19 nt, Artificial Sequence
  Synthetic
ggugugagguggauacuuu

SEQ ID NO: 5415 - RNA, 19 nt, Artificial Sequence
  Synthetic
caagacaccuuuuagagaa

SEQ ID NO: 5416 - RNA, 19 nt, Artificial Sequence
  Synthetic
cagaaagaccucuaguuuu

SEQ ID NO: 5417 - RNA, 19 nt, Artificial Sequence
  Synthetic
gcaaaggccuuaugcaacu

SEQ ID NO: 5418 - RNA, 19 nt, Artificial Sequence
  Synthetic
ucauaauccuggcugcaaa

SEQ ID NO: 5419 - RNA, 19 nt, Artificial Sequence
  Synthetic
gaaggcaaguuaggagaua

SEQ ID NO: 5420 - RNA, 19 nt, Artificial Sequence
  Synthetic
gcagaaguuacaugcacaa

SEQ ID NO: 5421 - RNA, 19 nt, Artificial Sequence
  Synthetic
ucaagaaauggcaucgaaa

SEQ ID NO: 5422 - RNA, 19 nt, Artificial Sequence
  Synthetic
gcaucuucccaaacaauua

SEQ ID NO: 5423 - RNA, 19 nt, Artificial Sequence
  Synthetic
guguuacuguguagaauuu

SEQ ID NO: 5424 - RNA, 19 nt, Artificial Sequence
  Synthetic
ggaaagcgguuuaggguuu

SEQ ID NO: 5425 - RNA, 19 nt, Artificial Sequence
  Synthetic
gaucauucuuuguuggaaa

SEQ ID NO: 5426 - RNA, 19 nt, Artificial Sequence
  Synthetic
auguuaagguugagaauga

SEQ ID NO: 5427 - RNA, 19 nt, Artificial Sequence
  Synthetic
cuaagaacuugcacagaaa

SEQ ID NO: 5428 - RNA, 19 nt, Artificial Sequence
  Synthetic
gaggaaugaaagauggaua

SEQ ID NO: 5429 - RNA, 19 nt, Artificial Sequence
  Synthetic
gaucaaugcccgagaggga

SEQ ID NO: 5430 - RNA, 19 nt, Artificial Sequence
  Synthetic
ggaaaagagaagaaguuua

SEQ ID NO: 5431 - RNA, 19 nt, Artificial Sequence
  Synthetic
aaagcagagugaagaaaua

SEQ ID NO: 5432 - RNA, 19 nt, Artificial Sequence
  Synthetic
ggacauucguucuguaaga

SEQ ID NO: 5433 - RNA, 19 nt, Artificial Sequence
  Synthetic
ucacacagcuguuggaaga

SEQ ID NO: 5434 - RNA, 19 nt, Artificial Sequence
  Synthetic
gcuuauauuugcacaagua

SEQ ID NO: 5435 - RNA, 19 nt, Artificial Sequence
  Synthetic
gagccaagauacagauuga

SEQ ID NO: 5436 - RNA, 19 nt, Artificial Sequence
  Synthetic
ugaaagaacgguugaccaa

SEQ ID NO: 5437 - RNA, 19 nt, Artificial Sequence
  Synthetic
agacagauuucgaagccaa

SEQ ID NO: 5438 - RNA, 19 nt, Artificial Sequence
  Synthetic
augaacugucugagagaaa

SEQ ID NO: 5439 - RNA, 19 nt, Artificial Sequence
  Synthetic
uggaagauguuaagguuga

SEQ ID NO: 5440 - RNA, 19 nt, Artificial Sequence
  Synthetic
ugaccaagauacagcauau

SEQ ID NO: 5441 - RNA, 19 nt, Artificial Sequence
  Synthetic
ugaauuugccucagauaua

SEQ ID NO: 5442 - RNA, 19 nt, Artificial Sequence
  Synthetic
gaacaggaugugauuguaa

SEQ ID NO: 5443 - RNA, 19 nt, Artificial Sequence
  Synthetic
gaccaagaauguuccaaua

SEQ ID NO: 5444 - RNA, 19 nt, Artificial Sequence
  Synthetic
gauaggagguacuguguca

SEQ ID NO: 5445 - RNA, 19 nt, Artificial Sequence
  Synthetic
acuaagaacuugcacagaa

SEQ ID NO: 5446 - RNA, 19 nt, Artificial Sequence
  Synthetic
aggaaugaaagauggauau

SEQ ID NO: 5447 - RNA, 19 nt, Artificial Sequence
  Synthetic
cagaaaugccugccagaga

SEQ ID NO: 5448 - RNA, 19 nt, Artificial Sequence
  Synthetic
guauaaacccauuaaggau

SEQ ID NO: 5449 - RNA, 19 nt, Artificial Sequence
  Synthetic
gaugauucgaagaaguaua

SEQ ID NO: 5450 - RNA, 19 nt, Artificial Sequence
  Synthetic
gcagcugguuucagaauuu

SEQ ID NO: 5451 - RNA, 19 nt, Artificial Sequence
  Synthetic
ggaagaaauaagcugaaaa

SEQ ID NO: 5452 - RNA, 19 nt, Artificial Sequence
  Synthetic
uggugauauuccagaagaa

SEQ ID NO: 5453 - RNA, 19 nt, Artificial Sequence
  Synthetic
uguaaaugaagauggaaga

SEQ ID NO: 5454 - RNA, 19 nt, Artificial Sequence
  Synthetic
gcaagaaccagaaagagaa

SEQ ID NO: 5455 - RNA, 19 nt, Artificial Sequence
  Synthetic
agaaggaacuugcagaaau

SEQ ID NO: 5456 - RNA, 19 nt, Artificial Sequence
  Synthetic
ccaaaggagacaacauuua

SEQ ID NO: 5457 - RNA, 19 nt, Artificial Sequence
  Synthetic
cuguagugcuggacccaaa

SEQ ID NO: 5458 - RNA, 19 nt, Artificial Sequence
  Synthetic
acaaagaguugaugacagu

SEQ ID NO: 5459 - RNA, 19 nt, Artificial Sequence
  Synthetic
ccaacagagcagagcauga

SEQ ID NO: 5460 - RNA, 19 nt, Artificial Sequence
  Synthetic
gaauggaggucaacuauau

SEQ ID NO: 5461 - RNA, 19 nt, Artificial Sequence
  Synthetic
gcugcuaaauugucaacua

SEQ ID NO: 5462 - RNA, 19 nt, Artificial Sequence
  Synthetic
ccacacaguacaugaccaa

SEQ ID NO: 5463 - RNA, 19 nt, Artificial Sequence
  Synthetic
cgauggagaucaacgugaa

SEQ ID NO: 5464 - RNA, 19 nt, Artificial Sequence
  Synthetic
gaugacaguccaagcacua

SEQ ID NO: 5465 - RNA, 19 nt, Artificial Sequence
  Synthetic
ggagacaacauuuaugaau

SEQ ID NO: 5466 - RNA, 19 nt, Artificial Sequence
  Synthetic
cuaaaagaauucagaagga

SEQ ID NO: 5467 - RNA, 19 nt, Artificial Sequence
  Synthetic
gaaggaacuugcagaaauc

SEQ ID NO: 5468 - RNA, 19 nt, Artificial Sequence
  Synthetic
cagaaggaacuugcagaaa

SEQ ID NO: 5469 - RNA, 19 nt, Artificial Sequence
  Synthetic
ccacugaggcacaaagagu

SEQ ID NO: 5470 - RNA, 19 nt, Artificial Sequence
  Synthetic
ucagaaggaacuugcagaa

SEQ ID NO: 5471 - RNA, 19 nt, Artificial Sequence
  Synthetic
ucagcaagaaccagaaaga

SEQ ID NO: 5472 - RNA, 19 nt, Artificial Sequence
  Synthetic
caagaaucuaucacuguaa

SEQ ID NO: 5473 - RNA, 19 nt, Artificial Sequence
  Synthetic
uaugaauggaggucaacua

SEQ ID NO: 5474 - RNA, 19 nt, Artificial Sequence
  Synthetic
gauggagaucaacgugaaa

SEQ ID NO: 5475 - RNA, 19 nt, Artificial Sequence
  Synthetic
ucaccagacuauccguuua

SEQ ID NO: 5476 - RNA, 19 nt, Artificial Sequence
  Synthetic
gcacaaagaguugaugaca

SEQ ID NO: 5477 - RNA, 19 nt, Artificial Sequence
  Synthetic
agaucaacgugaaaguguu

SEQ ID NO: 5478 - RNA, 19 nt, Artificial Sequence
  Synthetic
acaagaaucuaucacugua

SEQ ID NO: 5479 - RNA, 19 nt, Artificial Sequence
  Synthetic
caacuggaguccggcuuua

SEQ ID NO: 5480 - RNA, 19 nt, Artificial Sequence
  Synthetic
gagaucaacgugaaagugu

SEQ ID NO: 5481 - RNA, 19 nt, Artificial Sequence
  Synthetic
ugaauggaggucaacuaua

SEQ ID NO: 5482 - RNA, 19 nt, Artificial Sequence
  Synthetic
gcaaaaccgcugcuaaauu

SEQ ID NO: 5483 - RNA, 19 nt, Artificial Sequence
  Synthetic
gguguucuuucuugacauu

SEQ ID NO: 5484 - RNA, 19 nt, Artificial Sequence
  Synthetic
cugaagaccugaugggaaa

SEQ ID NO: 5485 - RNA, 19 nt, Artificial Sequence
  Synthetic
ugacaaagucggauauaaa

SEQ ID NO: 5486 - RNA, 19 nt, Artificial Sequence
  Synthetic
gagaagacauagacgguau

SEQ ID NO: 5487 - RNA, 19 nt, Artificial Sequence
  Synthetic
caacauaaucagccacaua

SEQ ID NO: 5488 - RNA, 19 nt, Artificial Sequence
  Synthetic
acaaagaagggaaguacua

SEQ ID NO: 5489 - RNA, 19 nt, Artificial Sequence
  Synthetic
agauaaacaucauagguga

SEQ ID NO: 5490 - RNA, 19 nt, Artificial Sequence
  Synthetic
ggaaguagacaaaccuaaa

SEQ ID NO: 5491 - RNA, 19 nt, Artificial Sequence
  Synthetic
cagcagugcaagagaacau

SEQ ID NO: 5492 - RNA, 19 nt, Artificial Sequence
  Synthetic
gauaaacaucauaggugaa

SEQ ID NO: 5493 - RNA, 19 nt, Artificial Sequence
  Synthetic
gagaaaacauggcaauuua

SEQ ID NO: 5494 - RNA, 19 nt, Artificial Sequence
  Synthetic
ugucugaacuccaaggaau

SEQ ID NO: 5495 - RNA, 19 nt, Artificial Sequence
  Synthetic
uaagagagcucgaaaacaa

SEQ ID NO: 5496 - RNA, 19 nt, Artificial Sequence
  Synthetic
gaacauacuugucucagaa

SEQ ID NO: 5497 - RNA, 19 nt, Artificial Sequence
  Synthetic
aaacagaugcaauggauca

SEQ ID NO: 5498 - RNA, 19 nt, Artificial Sequence
  Synthetic
caagaugccugcuggugaa

SEQ ID NO: 5499 - RNA, 19 nt, Artificial Sequence
  Synthetic
caucauaggugaaaaggau

SEQ ID NO: 5500 - RNA, 19 nt, Artificial Sequence
  Synthetic
ccauaagagagcucgaaaa

SEQ ID NO: 5501 - RNA, 19 nt, Artificial Sequence
  Synthetic
ccaaggaauaugaacaaga

SEQ ID NO: 5502 - RNA, 19 nt, Artificial Sequence
  Synthetic
guucagcagugcaagagaa

SEQ ID NO: 5503 - RNA, 19 nt, Artificial Sequence
  Synthetic
ugugguaaauugaccuaaa

SEQ ID NO: 5504 - RNA, 19 nt, Artificial Sequence
  Synthetic
ugggaaaccguuaguauuu

SEQ ID NO: 5505 - RNA, 19 nt, Artificial Sequence
  Synthetic
gcuuacaggcucauaucaa

SEQ ID NO: 5506 - RNA, 19 nt, Artificial Sequence
  Synthetic
ugagaauugaggcgcauaa

SEQ ID NO: 5507 - RNA, 19 nt, Artificial Sequence
  Synthetic
ccuaaaagacugcaagaca

SEQ ID NO: 5508 - RNA, 19 nt, Artificial Sequence
  Synthetic
gaugccugcuggugaacaa

SEQ ID NO: 5509 - RNA, 19 nt, Artificial Sequence
  Synthetic
gcaauuuaacaguugauca

SEQ ID NO: 5510 - RNA, 19 nt, Artificial Sequence
  Synthetic
gcuacaagagcaacauaau

SEQ ID NO: 5511 - RNA, 19 nt, Artificial Sequence
  Synthetic
uauacuguacuguggauaa

SEQ ID NO: 5512 - RNA, 19 nt, Artificial Sequence
  Synthetic
uauaugacaaagucggaua

SEQ ID NO: 5513 - RNA, 19 nt, Artificial Sequence
  Synthetic
acuauuauccugaguguca

SEQ ID NO: 5514 - RNA, 19 nt, Artificial Sequence
  Synthetic
gggaaauucuuuagguaua

SEQ ID NO: 5515 - RNA, 19 nt, Artificial Sequence
  Synthetic
gggaaauucuuuauggaaa

SEQ ID NO: 5516 - RNA, 19 nt, Artificial Sequence
  Synthetic
ggagcagauuagagagaaa

SEQ ID NO: 5517 - RNA, 19 nt, Artificial Sequence
  Synthetic
gggauauuguuuauggaaa

SEQ ID NO: 5518 - RNA, 19 nt, Artificial Sequence
  Synthetic
gcacugagaacuaguauua

SEQ ID NO: 5519 - RNA, 19 nt, Artificial Sequence
  Synthetic
gcaaagcagugcagugaau

SEQ ID NO: 5520 - RNA, 19 nt, Artificial Sequence
  Synthetic
agaaagugguaaagauuca

SEQ ID NO: 5521 - RNA, 19 nt, Artificial Sequence
  Synthetic
guagaaagugguaaagauu

SEQ ID NO: 5522 - RNA, 19 nt, Artificial Sequence
  Synthetic
gugcagcaaaugugggaua

SEQ ID NO: 5523 - RNA, 19 nt, Artificial Sequence
  Synthetic
cgacauuugugaagaacca

SEQ ID NO: 5524 - RNA, 19 nt, Artificial Sequence
  Synthetic
ggaaguucuuuaagugcaa

SEQ ID NO: 5525 - RNA, 19 nt, Artificial Sequence
  Synthetic
gggaaauucuucagcuuga

SEQ ID NO: 5526 - RNA, 19 nt, Artificial Sequence
  Synthetic
aaacaauggugaaguacau

SEQ ID NO: 5527 - RNA, 19 nt, Artificial Sequence
  Synthetic
ggaaagaggccuuaugguu

SEQ ID NO: 5528 - RNA, 19 nt, Artificial Sequence
  Synthetic
ggauauuguuuauggaaag

SEQ ID NO: 5529 - RNA, 19 nt, Artificial Sequence
  Synthetic
aguagaaagugguaaagau

SEQ ID NO: 5530 - RNA, 19 nt, Artificial Sequence
  Synthetic
augugaugcuggagaauuu

SEQ ID NO: 5531 - RNA, 19 nt, Artificial Sequence
  Synthetic
gauuuagcacugagaacua

SEQ ID NO: 5532 - RNA, 19 nt, Artificial Sequence
  Synthetic
ccuuaugagugcaaugaau

SEQ ID NO: 5533 - RNA, 19 nt, Artificial Sequence
  Synthetic
ggagaaaggccuuaugagu

SEQ ID NO: 5534 - RNA, 19 nt, Artificial Sequence
  Synthetic
gugaugugaugcuggagaa

SEQ ID NO: 5535 - RNA, 19 nt, Artificial Sequence
  Synthetic
gugggaaauucuuuaggua

SEQ ID NO: 5536 - RNA, 19 nt, Artificial Sequence
  Synthetic
uugaagacguggccauaua

SEQ ID NO: 5537 - RNA, 19 nt, Artificial Sequence
  Synthetic
ccaaagaguuuacacugaa

SEQ ID NO: 5538 - RNA, 19 nt, Artificial Sequence
  Synthetic
gaaaagagccaguggaaaa

SEQ ID NO: 5539 - RNA, 19 nt, Artificial Sequence
  Synthetic
agaaguagccuuaguaaua

SEQ ID NO: 5540 - RNA, 19 nt, Artificial Sequence
  Synthetic
cagaauugcuaguaguuua

SEQ ID NO: 5541 - RNA, 19 nt, Artificial Sequence
  Synthetic
gggcaugacagaaggagua

SEQ ID NO: 5542 - RNA, 19 nt, Artificial Sequence
  Synthetic
gaaucagccuagaggagaa

SEQ ID NO: 5543 - RNA, 19 nt, Artificial Sequence
  Synthetic
gcagggaugcugugaauaa

SEQ ID NO: 5544 - RNA, 19 nt, Artificial Sequence
  Synthetic
cagcagauccaaagaagua

SEQ ID NO: 5545 - RNA, 19 nt, Artificial Sequence
  Synthetic
aguuuuacuugcaggguua

SEQ ID NO: 5546 - RNA, 19 nt, Artificial Sequence
  Synthetic
cgaaagagcagcuugagaa

SEQ ID NO: 5547 - RNA, 19 nt, Artificial Sequence
  Synthetic
gaaagagcagcuugagaaa

SEQ ID NO: 5548 - RNA, 19 nt, Artificial Sequence
  Synthetic
aaucaaagaugaagaagca

SEQ ID NO: 5549 - RNA, 19 nt, Artificial Sequence
  Synthetic
gcacugaaaugaaaucaaa

SEQ ID NO: 5550 - RNA, 19 nt, Artificial Sequence
  Synthetic
guacagcacugaaaugaaa

SEQ ID NO: 5551 - RNA, 19 nt, Artificial Sequence
  Synthetic
caucaaauuuccagggacu

SEQ ID NO: 5552 - RNA, 19 nt, Artificial Sequence
  Synthetic
ggauguagacugacagaca

SEQ ID NO: 5553 - RNA, 19 nt, Artificial Sequence
  Synthetic
gagaauugguucagguagu

SEQ ID NO: 5554 - RNA, 19 nt, Artificial Sequence
  Synthetic
ggagaaauuuugcaaugua

SEQ ID NO: 5555 - RNA, 19 nt, Artificial Sequence
  Synthetic
ccgcagggaugcugugaau

SEQ ID NO: 5556 - RNA, 19 nt, Artificial Sequence
  Synthetic
uauagagguuugugaagaa

SEQ ID NO: 5557 - RNA, 19 nt, Artificial Sequence
  Synthetic
aagagcagcuugagaaaca

SEQ ID NO: 5558 - RNA, 19 nt, Artificial Sequence
  Synthetic
ccucuaugcuggacaucaa

SEQ ID NO: 5559 - RNA, 19 nt, Artificial Sequence
  Synthetic
gagaugaucaggcaggaaa

SEQ ID NO: 5560 - RNA, 19 nt, Artificial Sequence
  Synthetic
gaagaagcauugauuguau

SEQ ID NO: 5561 - RNA, 19 nt, Artificial Sequence
  Synthetic
ugauagaacugcagguugu

SEQ ID NO: 5562 - RNA, 19 nt, Artificial Sequence
  Synthetic
ugguugaggaauucagaaa

SEQ ID NO: 5563 - RNA, 19 nt, Artificial Sequence
  Synthetic
gaaguuaacucaagaugga

SEQ ID NO: 5564 - RNA, 19 nt, Artificial Sequence
  Synthetic
caggaaugaugcuuugaua

SEQ ID NO: 5565 - RNA, 19 nt, Artificial Sequence
  Synthetic
gggcauucuugcucaguau

SEQ ID NO: 5566 - RNA, 19 nt, Artificial Sequence
  Synthetic
uaucaagucugaauagcaa

SEQ ID NO: 5567 - RNA, 19 nt, Artificial Sequence
  Synthetic
uagcaaauuuggauguaga

SEQ ID NO: 5568 - RNA, 19 nt, Artificial Sequence
  Synthetic
gcauaaauuuggagaaaga

SEQ ID NO: 5569 - RNA, 19 nt, Artificial Sequence
  Synthetic
ucaggaagguggaagaaua

SEQ ID NO: 5570 - RNA, 19 nt, Artificial Sequence
  Synthetic
cugcauaacuuuggaauua

SEQ ID NO: 5571 - RNA, 19 nt, Artificial Sequence
  Synthetic
ggagaaaggauaagacuca

SEQ ID NO: 5572 - RNA, 19 nt, Artificial Sequence
  Synthetic
agaagaagaugaaggcuau

SEQ ID NO: 5573 - RNA, 19 nt, Artificial Sequence
  Synthetic
ucaaguaccuuuugugaua

SEQ ID NO: 5574 - RNA, 19 nt, Artificial Sequence
  Synthetic
uggagaaagaugugacuua

SEQ ID NO: 5575 - RNA, 19 nt, Artificial Sequence
  Synthetic
gggaagaggagcucagauu

SEQ ID NO: 5576 - RNA, 19 nt, Artificial Sequence
  Synthetic
caggaagguggaagaauaa

SEQ ID NO: 5577 - RNA, 19 nt, Artificial Sequence
  Synthetic
aaaugaagcuucuagguau

SEQ ID NO: 5578 - RNA, 19 nt, Artificial Sequence
  Synthetic
uaucauugcugaagacauu

SEQ ID NO: 5579 - RNA, 19 nt, Artificial Sequence
  Synthetic
ggagaaagaugugacuuaa

SEQ ID NO: 5580 - RNA, 19 nt, Artificial Sequence
  Synthetic
cagaagggcuugacauuca

SEQ ID NO: 5581 - RNA, 19 nt, Artificial Sequence
  Synthetic
ccuaaggacuaccacaaua

SEQ ID NO: 5582 - RNA, 19 nt, Artificial Sequence
  Synthetic
gcgcauggauuuucauuuu

SEQ ID NO: 5583 - RNA, 19 nt, Artificial Sequence
  Synthetic
ggagaugaagugcagguua

SEQ ID NO: 5584 - RNA, 19 nt, Artificial Sequence
  Synthetic
caguugaggccauggauuu

SEQ ID NO: 5585 - RNA, 19 nt, Artificial Sequence
  Synthetic
uaacaacccaguagcauua

SEQ ID NO: 5586 - RNA, 19 nt, Artificial Sequence
  Synthetic
ggaugagcucuaugaguuu

SEQ ID NO: 5587 - RNA, 19 nt, Artificial Sequence
  Synthetic
gaauguaaguuucaguuga

SEQ ID NO: 5588 - RNA, 19 nt, Artificial Sequence
  Synthetic
gagaugaagugcagguuac

SEQ ID NO: 5589 - RNA, 19 nt, Artificial Sequence
  Synthetic
gaaaggugccauucaguuu

SEQ ID NO: 5590 - RNA, 19 nt, Artificial Sequence
  Synthetic
gaauaaagcagaauguaag

SEQ ID NO: 5591 - RNA, 19 nt, Artificial Sequence
  Synthetic
uggaugagcucuaugaguu

SEQ ID NO: 5592 - RNA, 19 nt, Artificial Sequence
  Synthetic
gcuccaagaugucccuuua

SEQ ID NO: 5593 - RNA, 19 nt, Artificial Sequence
  Synthetic
caaucaagcaggaaucauu

SEQ ID NO: 5594 - RNA, 19 nt, Artificial Sequence
  Synthetic
cuaaggacuaccacaauaa

SEQ ID NO: 5595 - RNA, 19 nt, Artificial Sequence
  Synthetic
ugagaaaccaagucaauca

SEQ ID NO: 5596 - RNA, 19 nt, Artificial Sequence
  Synthetic
augcaaaccuauuucauca

SEQ ID NO: 5597 - RNA, 19 nt, Artificial Sequence
  Synthetic
gguauuguaucauugagaa

SEQ ID NO: 5598 - RNA, 19 nt, Artificial Sequence
  Synthetic
ccucauaaauagugacaua

SEQ ID NO: 5599 - RNA, 19 nt, Artificial Sequence
  Synthetic
uaacagaaggagagagaaa

SEQ ID NO: 5600 - RNA, 19 nt, Artificial Sequence
  Synthetic
gauuaaaccugaugagaau

SEQ ID NO: 5601 - RNA, 19 nt, Artificial Sequence
  Synthetic
gugaugaaguguuggaaau

SEQ ID NO: 5602 - RNA, 19 nt, Artificial Sequence
  Synthetic
augauaaagcucagggaaa

SEQ ID NO: 5603 - RNA, 19 nt, Artificial Sequence
  Synthetic
guacaauggaccagaaauu

SEQ ID NO: 5604 - RNA, 19 nt, Artificial Sequence
  Synthetic
acacaacacuccugauaaa

SEQ ID NO: 5605 - RNA, 19 nt, Artificial Sequence
  Synthetic
gcaauaugacuaugacaaa

SEQ ID NO: 5606 - RNA, 19 nt, Artificial Sequence
  Synthetic
ccauagaggaagacagaga

SEQ ID NO: 5607 - RNA, 19 nt, Artificial Sequence
  Synthetic
guaggaagguugcugaaua

SEQ ID NO: 5608 - RNA, 19 nt, Artificial Sequence
  Synthetic
uggagaaggccaugguuaa

SEQ ID NO: 5609 - RNA, 19 nt, Artificial Sequence
  Synthetic
ugauaaagcucagggaaau

SEQ ID NO: 5610 - RNA, 19 nt, Artificial Sequence
  Synthetic
uggugaagguggaaggaga

SEQ ID NO: 5611 - RNA, 19 nt, Artificial Sequence
  Synthetic
agagaauguuagaagagaa

SEQ ID NO: 5612 - RNA, 19 nt, Artificial Sequence
  Synthetic
gaagauuguuguacgagaa

SEQ ID NO: 5613 - RNA, 19 nt, Artificial Sequence
  Synthetic
uguuagaagagaaggaaga

SEQ ID NO: 5614 - RNA, 19 nt, Artificial Sequence
  Synthetic
gaacaaguuacuaaggcua

SEQ ID NO: 5615 - RNA, 19 nt, Artificial Sequence
  Synthetic
gaucaaauuugcccugaaa

SEQ ID NO: 5616 - RNA, 19 nt, Artificial Sequence
  Synthetic
ccacgaaugagguuauaaa

SEQ ID NO: 5617 - RNA, 19 nt, Artificial Sequence
  Synthetic
cuuaacagaaggagagaga

SEQ ID NO: 5618 - RNA, 19 nt, Artificial Sequence
  Synthetic
cgaaagacuuggugaaggu

SEQ ID NO: 5619 - RNA, 19 nt, Artificial Sequence
  Synthetic
cgagaauccuguaucuuaa

SEQ ID NO: 5620 - RNA, 19 nt, Artificial Sequence
  Synthetic
gaggcaacacacugggaua

SEQ ID NO: 5621 - RNA, 19 nt, Artificial Sequence
  Synthetic
gaugaucauuacagacuaa

SEQ ID NO: 5622 - RNA, 19 nt, Artificial Sequence
  Synthetic
cagacuaaaugaugaacuu

SEQ ID NO: 5623 - RNA, 19 nt, Artificial Sequence
  Synthetic
gguuaaaaggcuuggaaca

SEQ ID NO: 5624 - RNA, 19 nt, Artificial Sequence
  Synthetic
ugauuaaaccugaugagaa

SEQ ID NO: 5625 - RNA, 19 nt, Artificial Sequence
  Synthetic
uguuaagaauccuguacaa

SEQ ID NO: 5626 - RNA, 19 nt, Artificial Sequence
  Synthetic
cccacaaacugaaaggaau

SEQ ID NO: 5627 - RNA, 19 nt, Artificial Sequence
  Synthetic
cgucagagacaacuauaaa

SEQ ID NO: 5628 - RNA, 19 nt, Artificial Sequence
  Synthetic
gugcaucgcccuugugcua

SEQ ID NO: 5629 - RNA, 19 nt, Artificial Sequence
  Synthetic
gugcugugugugaggauga

SEQ ID NO: 5630 - RNA, 19 nt, Artificial Sequence
  Synthetic
ugauaaaugggguguguuu

SEQ ID NO: 5631 - RNA, 19 nt, Artificial Sequence
  Synthetic
ccgggcagcgguugacaaa

SEQ ID NO: 5632 - RNA, 19 nt, Artificial Sequence
  Synthetic
acauucugcuacaacaaua

SEQ ID NO: 5633 - RNA, 19 nt, Artificial Sequence
  Synthetic
gcaucgcccuugugcuauu

SEQ ID NO: 5634 - RNA, 19 nt, Artificial Sequence
  Synthetic
gguguugugcuguguguga

SEQ ID NO: 5635 - RNA, 19 nt, Artificial Sequence
  Synthetic
gggcagcgguugacaaagc

SEQ ID NO: 5636 - RNA, 19 nt, Artificial Sequence
  Synthetic
gcauacacggguucaagau

SEQ ID NO: 5637 - RNA, 19 nt, Artificial Sequence
  Synthetic
cgcaacugccuuuguauga

SEQ ID NO: 5638 - RNA, 19 nt, Artificial Sequence
  Synthetic
caacugccuuuguaugaca

SEQ ID NO: 5639 - RNA, 19 nt, Artificial Sequence
  Synthetic
gugggcacuugcacgauuu

SEQ ID NO: 5640 - RNA, 19 nt, Artificial Sequence
  Synthetic
gcaacugccuuuguaugac

SEQ ID NO: 5641 - RNA, 19 nt, Artificial Sequence
  Synthetic
guaugugugugugcaugug

SEQ ID NO: 5642 - RNA, 19 nt, Artificial Sequence
  Synthetic
caucgcccuugugcuauug

SEQ ID NO: 5643 - RNA, 19 nt, Artificial Sequence
  Synthetic
gcuaaaagaggcagagaaa

SEQ ID NO: 5644 - RNA, 19 nt, Artificial Sequence
  Synthetic
cagagaaagagcugaagaa

SEQ ID NO: 5645 - RNA, 19 nt, Artificial Sequence
  Synthetic
ccucauagauggcgagacu

SEQ ID NO: 5646 - RNA, 19 nt, Artificial Sequence
  Synthetic
uaaaagaggcagagaaaga

SEQ ID NO: 5647 - RNA, 19 nt, Artificial Sequence
  Synthetic
gagaaagagcugaagaaag

SEQ ID NO: 5648 - RNA, 19 nt, Artificial Sequence
  Synthetic
agaaagagcugaagaaagc

SEQ ID NO: 5649 - RNA, 19 nt, Artificial Sequence
  Synthetic
ggaacgacauccaccacaa

SEQ ID NO: 5650 - RNA, 19 nt, Artificial Sequence
  Synthetic
agagaaagagcugaagaaa

SEQ ID NO: 5651 - RNA, 19 nt, Artificial Sequence
  Synthetic
acaaagugacuguguccaa

SEQ ID NO: 5652 - RNA, 19 nt, Artificial Sequence
  Synthetic
gcaagaacaaagugacugu

SEQ ID NO: 5653 - RNA, 19 nt, Artificial Sequence
  Synthetic
gcagagaaagagcugaaga

SEQ ID NO: 5654 - RNA, 19 nt, Artificial Sequence
  Synthetic
ggguaucacagaugacuga

SEQ ID NO: 5655 - RNA, 19 nt, Artificial Sequence
  Synthetic
gagcgaaggguaucacaga

SEQ ID NO: 5656 - RNA, 19 nt, Artificial Sequence
  Synthetic
uuggagaagugccggcauu

SEQ ID NO: 5657 - RNA, 19 nt, Artificial Sequence
  Synthetic
gcaccauugucauccagua

SEQ ID NO: 5658 - RNA, 19 nt, Artificial Sequence
  Synthetic
ggaggcaccugcaagaaca

SEQ ID NO: 5659 - RNA, 19 nt, Artificial Sequence
  Synthetic
gauccagaaugccaagaca

SEQ ID NO: 5660 - RNA, 19 nt, Artificial Sequence
  Synthetic
ggacagaagcagacagaaa

SEQ ID NO: 5661 - RNA, 19 nt, Artificial Sequence
  Synthetic
gcucagacucagagggaaa

SEQ ID NO: 5662 - RNA, 19 nt, Artificial Sequence
  Synthetic
ggacagagguggcagugaa

SEQ ID NO: 5663 - RNA, 19 nt, Artificial Sequence
  Synthetic
agagagagguugucaagaa

SEQ ID NO: 5664 - RNA, 19 nt, Artificial Sequence
  Synthetic
uguaaggaaagcagagaaa

SEQ ID NO: 5665 - RNA, 19 nt, Artificial Sequence
  Synthetic
cgaugacacugaagaggaa

SEQ ID NO: 5666 - RNA, 19 nt, Artificial Sequence
  Synthetic
gagagagguugucaagaaa

SEQ ID NO: 5667 - RNA, 19 nt, Artificial Sequence
  Synthetic
uugaacagcagaagagaaa

SEQ ID NO: 5668 - RNA, 19 nt, Artificial Sequence
  Synthetic
gaacagaggaaaaugaaaa

SEQ ID NO: 5669 - RNA, 19 nt, Artificial Sequence
  Synthetic
aaaggaaaccaguaagaua

SEQ ID NO: 5670 - RNA, 19 nt, Artificial Sequence
  Synthetic
agagacaaguuuugagaga

SEQ ID NO: 5671 - RNA, 19 nt, Artificial Sequence
  Synthetic
aaggaaaccaguaagauaa

SEQ ID NO: 5672 - RNA, 19 nt, Artificial Sequence
  Synthetic
ccaaaucaagagagaagaa

SEQ ID NO: 5673 - RNA, 19 nt, Artificial Sequence
  Synthetic
cucaagaaauugcaagaaa

SEQ ID NO: 5674 - RNA, 19 nt, Artificial Sequence
  Synthetic
aagaaggccugauguguaa

SEQ ID NO: 5675 - RNA, 19 nt, Artificial Sequence
  Synthetic
cggaguugggagauggaaa

SEQ ID NO: 5676 - RNA, 19 nt, Artificial Sequence
  Synthetic
ccaguaagauaaaggcaga

SEQ ID NO: 5677 - RNA, 19 nt, Artificial Sequence
  Synthetic
agacaaguuuugagagauc

SEQ ID NO: 5678 - RNA, 19 nt, Artificial Sequence
  Synthetic
uaccaugacuguaaggaaa

SEQ ID NO: 5679 - RNA, 19 nt, Artificial Sequence
  Synthetic
gaaaauguauggagugauu

SEQ ID NO: 5680 - RNA, 19 nt, Artificial Sequence
  Synthetic
gagagguugucaagaaauu

SEQ ID NO: 5681 - RNA, 19 nt, Artificial Sequence
  Synthetic
aaacaucagucaagcagaa

SEQ ID NO: 5682 - RNA, 19 nt, Artificial Sequence
  Synthetic
aggcagacccugagaaacu

SEQ ID NO: 5683 - RNA, 19 nt, Artificial Sequence
  Synthetic
ccaagaaaggcaucauuua

SEQ ID NO: 5684 - RNA, 19 nt, Artificial Sequence
  Synthetic
uaagaaagaggaagccaaa

SEQ ID NO: 5685 - RNA, 19 nt, Artificial Sequence
  Synthetic
ucaaguaguucaacaagaa

SEQ ID NO: 5686 - RNA, 19 nt, Artificial Sequence
  Synthetic
cagucaagcagaaacauaa

SEQ ID NO: 5687 - RNA, 19 nt, Artificial Sequence
  Synthetic
cgaauuugcugucagggaa

SEQ ID NO: 5688 - RNA, 19 nt, Artificial Sequence
  Synthetic
aagccaaaccugaggagau

SEQ ID NO: 5689 - RNA, 19 nt, Artificial Sequence
  Synthetic
ggaauauagaagagaccca

SEQ ID NO: 5690 - RNA, 19 nt, Artificial Sequence
  Synthetic
aaacaaagccagugaagaa

SEQ ID NO: 5691 - RNA, 19 nt, Artificial Sequence
  Synthetic
gagaauaugaagaggaaau

SEQ ID NO: 5692 - RNA, 19 nt, Artificial Sequence
  Synthetic
ccuuggaguuggagaacaa

SEQ ID NO: 5693 - RNA, 19 nt, Artificial Sequence
  Synthetic
gcauaauacugaaacacaa

SEQ ID NO: 5694 - RNA, 19 nt, Artificial Sequence
  Synthetic
ugacaguagugauaggaaa

SEQ ID NO: 5695 - RNA, 19 nt, Artificial Sequence
  Synthetic
gagagaggcucaagggaca

SEQ ID NO: 5696 - RNA, 19 nt, Artificial Sequence
  Synthetic
caaagaaacacuggagaua

SEQ ID NO: 5697 - RNA, 19 nt, Artificial Sequence
  Synthetic
gaucaagaggaaacagaaa

SEQ ID NO: 5698 - RNA, 19 nt, Artificial Sequence
  Synthetic
ggaacugagaagagaauau

SEQ ID NO: 5699 - RNA, 19 nt, Artificial Sequence
  Synthetic
cuaaauggacagaggaaga

SEQ ID NO: 5700 - RNA, 19 nt, Artificial Sequence
  Synthetic
aagaaacacuggagauauu

SEQ ID NO: 5701 - RNA, 19 nt, Artificial Sequence
  Synthetic
ggagguggauaaagagcaa

SEQ ID NO: 5702 - RNA, 19 nt, Artificial Sequence
  Synthetic
agaaggagguggauaaaga

SEQ ID NO: 5703 - RNA, 19 nt, Artificial Sequence
  Synthetic
caaaguaaggccugguaaa

SEQ ID NO: 5704 - RNA, 19 nt, Artificial Sequence
  Synthetic
aagagaauaugaagaggaa

SEQ ID NO: 5705 - RNA, 19 nt, Artificial Sequence
  Synthetic
cuuuaaagaugcaguugaa

SEQ ID NO: 5706 - RNA, 19 nt, Artificial Sequence
  Synthetic
ggaaagacuccguaucuaa

SEQ ID NO: 5707 - RNA, 19 nt, Artificial Sequence
  Synthetic
ggaaguggcugaugacuau

SEQ ID NO: 5708 - RNA, 19 nt, Artificial Sequence
  Synthetic
uaguaaagcuggaauguga

SEQ ID NO: 5709 - RNA, 19 nt, Artificial Sequence
  Synthetic
ugaaauggcucuacccaaa

SEQ ID NO: 5710 - RNA, 19 nt, Artificial Sequence
  Synthetic
aggaggaagaagaggaaaa

SEQ ID NO: 5711 - RNA, 19 nt, Artificial Sequence
  Synthetic
caaucaugggaaagaguua

SEQ ID NO: 5712 - RNA, 19 nt, Artificial Sequence
  Synthetic
ggaacuggcaagaaagcua

SEQ ID NO: 5713 - RNA, 19 nt, Artificial Sequence
  Synthetic
ucaagaggaaacagaaaua

SEQ ID NO: 5714 - RNA, 19 nt, Artificial Sequence
  Synthetic
agggcaagacacagaaaua

SEQ ID NO: 5715 - RNA, 19 nt, Artificial Sequence
  Synthetic
aagaauacauacagagguu

SEQ ID NO: 5716 - RNA, 19 nt, Artificial Sequence
  Synthetic
gggaaagaguuaugugucu

SEQ ID NO: 5717 - RNA, 19 nt, Artificial Sequence
  Synthetic
uggcagaggaggaagaaga

SEQ ID NO: 5718 - RNA, 19 nt, Artificial Sequence
  Synthetic
augaggaacuggcaagaaa

SEQ ID NO: 5719 - RNA, 19 nt, Artificial Sequence
  Synthetic
caguugaagcagucaguua

SEQ ID NO: 5720 - RNA, 19 nt, Artificial Sequence
  Synthetic
agaaagaggcagaaagaga

SEQ ID NO: 5721 - RNA, 19 nt, Artificial Sequence
  Synthetic
gaauauaagagggaagaaa

SEQ ID NO: 5722 - RNA, 19 nt, Artificial Sequence
  Synthetic
ugacacaagcuaagaguau

SEQ ID NO: 5723 - RNA, 19 nt, Artificial Sequence
  Synthetic
agagaaagaggcagaaaga

SEQ ID NO: 5724 - RNA, 19 nt, Artificial Sequence
  Synthetic
gaggaauaauauagaacga

SEQ ID NO: 5725 - RNA, 19 nt, Artificial Sequence
  Synthetic
cuugagcccuugaggaaua

SEQ ID NO: 5726 - RNA, 19 nt, Artificial Sequence
  Synthetic
ccacuaaacaccagaagca

SEQ ID NO: 5727 - RNA, 19 nt, Artificial Sequence
  Synthetic
gaugaagagaugaacauuu

SEQ ID NO: 5728 - RNA, 19 nt, Artificial Sequence
  Synthetic
gguaaauacuaaucagaca

SEQ ID NO: 5729 - RNA, 19 nt, Artificial Sequence
  Synthetic
guaguaaagugcugaggaa

SEQ ID NO: 5730 - RNA, 19 nt, Artificial Sequence
  Synthetic
cuagagaacuuaugaaaga

SEQ ID NO: 5731 - RNA, 19 nt, Artificial Sequence
  Synthetic
ggaauuaccugcugcgauu

SEQ ID NO: 5732 - RNA, 19 nt, Artificial Sequence
  Synthetic
gcacagaacaucagcugaa

SEQ ID NO: 5733 - RNA, 19 nt, Artificial Sequence
  Synthetic
guacaagucccaugacaaa

SEQ ID NO: 5734 - RNA, 19 nt, Artificial Sequence
  Synthetic
agaacaaggucuucaguuu

SEQ ID NO: 5735 - RNA, 19 nt, Artificial Sequence
  Synthetic
gaaaauuggaucagcaaaa

SEQ ID NO: 5736 - RNA, 19 nt, Artificial Sequence
  Synthetic
aguaaagugcugaggaaaa

SEQ ID NO: 5737 - RNA, 19 nt, Artificial Sequence
  Synthetic
uccaauaacuagagaacuu

SEQ ID NO: 5738 - RNA, 19 nt, Artificial Sequence
  Synthetic
gcacaugaucuuggaauua

SEQ ID NO: 5739 - RNA, 19 nt, Artificial Sequence
  Synthetic
ucucagggucaguggauaa

SEQ ID NO: 5740 - RNA, 19 nt, Artificial Sequence
  Synthetic
gaaaagaacuguugaaucu

SEQ ID NO: 5741 - RNA, 19 nt, Artificial Sequence
  Synthetic
gaacugugguuuuguggaa

SEQ ID NO: 5742 - RNA, 19 nt, Artificial Sequence
  Synthetic
ccaaauaggacucugaaaa

SEQ ID NO: 5743 - RNA, 19 nt, Artificial Sequence
  Synthetic
aaaaggaagcaauggaaaa

SEQ ID NO: 5744 - RNA, 19 nt, Artificial Sequence
  Synthetic
auagauggcuggagacaca

SEQ ID NO: 5745 - RNA, 19 nt, Artificial Sequence
  Synthetic
gaacaucagcugaagcaau

SEQ ID NO: 5746 - RNA, 19 nt, Artificial Sequence
  Synthetic
acacauggacuuacuauaa

SEQ ID NO: 5747 - RNA, 19 nt, Artificial Sequence
  Synthetic
cguacaagucccaugacaa

SEQ ID NO: 5748 - RNA, 19 nt, Artificial Sequence
  Synthetic
uagaugugguaguguuaaa

SEQ ID NO: 5749 - RNA, 19 nt, Artificial Sequence
  Synthetic
gagcucaggaccaagguua

SEQ ID NO: 5750 - RNA, 19 nt, Artificial Sequence
  Synthetic
gcacagucauacaaauuau

SEQ ID NO: 5751 - RNA, 19 nt, Artificial Sequence
  Synthetic
uaaagaacauggugaaacu

SEQ ID NO: 5752 - RNA, 19 nt, Artificial Sequence
  Synthetic
ggauaagucugucauagua

SEQ ID NO: 5753 - RNA, 19 nt, Artificial Sequence
  Synthetic
uaacagugugggaugauaa

SEQ ID NO: 5754 - RNA, 19 nt, Artificial Sequence
  Synthetic
gaaaaggaagcaauggaaa

SEQ ID NO: 5755 - RNA, 19 nt, Artificial Sequence
  Synthetic
gaacaaggucuucaguuuu

SEQ ID NO: 5756 - RNA, 19 nt, Artificial Sequence
  Synthetic
gaaacugauucacacauua

SEQ ID NO: 5757 - RNA, 19 nt, Artificial Sequence
  Synthetic
gcuacugguucaauggaca

SEQ ID NO: 5758 - RNA, 19 nt, Artificial Sequence
  Synthetic
gagagaaacuccaggaaau

SEQ ID NO: 5759 - RNA, 19 nt, Artificial Sequence
  Synthetic
gggagguggaggugggaaa

SEQ ID NO: 5760 - RNA, 19 nt, Artificial Sequence
  Synthetic
agaaagagaacaugaggaa

SEQ ID NO: 5761 - RNA, 19 nt, Artificial Sequence
  Synthetic
cagcagaucugauggagaa

SEQ ID NO: 5762 - RNA, 19 nt, Artificial Sequence
  Synthetic
ggagcaucacagagagaaa

SEQ ID NO: 5763 - RNA, 19 nt, Artificial Sequence
  Synthetic
ucagagagccuguguguaa

SEQ ID NO: 5764 - RNA, 19 nt, Artificial Sequence
  Synthetic
ugaaggagaugcuaagaaa

SEQ ID NO: 5765 - RNA, 19 nt, Artificial Sequence
  Synthetic
aggaagagaaagagaacau

SEQ ID NO: 5766 - RNA, 19 nt, Artificial Sequence
  Synthetic
cagcaaaucagaagccuaa

SEQ ID NO: 5767 - RNA, 19 nt, Artificial Sequence
  Synthetic
ggaaugaaggagaugcuaa

SEQ ID NO: 5768 - RNA, 19 nt, Artificial Sequence
  Synthetic
aaucagaagccuaagcaaa

SEQ ID NO: 5769 - RNA, 19 nt, Artificial Sequence
  Synthetic
acuagaacaggaagagaaa

SEQ ID NO: 5770 - RNA, 19 nt, Artificial Sequence
  Synthetic
caugagaaggagagaguga

SEQ ID NO: 5771 - RNA, 19 nt, Artificial Sequence
  Synthetic
ugagaaggagagagugaaa

SEQ ID NO: 5772 - RNA, 19 nt, Artificial Sequence
  Synthetic
ccgacaacccggaaagauu

SEQ ID NO: 5773 - RNA, 19 nt, Artificial Sequence
  Synthetic
ggaucugaagagugugaaa

SEQ ID NO: 5774 - RNA, 19 nt, Artificial Sequence
  Synthetic
gcguguaaggagaaaggaa

SEQ ID NO: 5775 - RNA, 19 nt, Artificial Sequence
  Synthetic
uagaacaggaagagaaaga

SEQ ID NO: 5776 - RNA, 19 nt, Artificial Sequence
  Synthetic
gaacaggaagagaaagaga

SEQ ID NO: 5777 - RNA, 19 nt, Artificial Sequence
  Synthetic
gaaacaagaccgaguggga

SEQ ID NO: 5778 - RNA, 19 nt, Artificial Sequence
  Synthetic
augaggaagcugaggaaca

SEQ ID NO: 5779 - RNA, 19 nt, Artificial Sequence
  Synthetic
agagagaaacuccaggaaa

SEQ ID NO: 5780 - RNA, 19 nt, Artificial Sequence
  Synthetic
uuucgaaucucuugaggaa

SEQ ID NO: 5781 - RNA, 19 nt, Artificial Sequence
  Synthetic
cggaggaucugaagagugu

SEQ ID NO: 5782 - RNA, 19 nt, Artificial Sequence
  Synthetic
ggacuaugaaucuggacau

SEQ ID NO: 5783 - RNA, 19 nt, Artificial Sequence
  Synthetic
ggagcugggaggaacauaa

SEQ ID NO: 5784 - RNA, 19 nt, Artificial Sequence
  Synthetic
ccgagugggaagugggcau

SEQ ID NO: 5785 - RNA, 19 nt, Artificial Sequence
  Synthetic
gaagagaaagagaacauga

SEQ ID NO: 5786 - RNA, 19 nt, Artificial Sequence
  Synthetic
ugaggaacaaugagaucaa

SEQ ID NO: 5787 - RNA, 19 nt, Artificial Sequence
  Synthetic
ugaggaagcugaggaacaa

SEQ ID NO: 5788 - RNA, 19 nt, Artificial Sequence
  Synthetic
gggugaagcccaagaauuu

SEQ ID NO: 5789 - RNA, 19 nt, Artificial Sequence
  Synthetic
ggacuaagugggaaugaua

SEQ ID NO: 5790 - RNA, 19 nt, Artificial Sequence
  Synthetic
guaacaaguucccaggaua

SEQ ID NO: 5791 - RNA, 19 nt, Artificial Sequence
  Synthetic
uggcagaggugaaagaaaa

SEQ ID NO: 5792 - RNA, 19 nt, Artificial Sequence
  Synthetic
augcauauuugaaggacua

SEQ ID NO: 5793 - RNA, 19 nt, Artificial Sequence
  Synthetic
gugaaagacauguuaagaa

SEQ ID NO: 5794 - RNA, 19 nt, Artificial Sequence
  Synthetic
ggaaagcaguacaugauuu

SEQ ID NO: 5795 - RNA, 19 nt, Artificial Sequence
  Synthetic
ggaaugauaaagacagaau

SEQ ID NO: 5796 - RNA, 19 nt, Artificial Sequence
  Synthetic
cagaggagccaaaggccaa

SEQ ID NO: 5797 - RNA, 19 nt, Artificial Sequence
  Synthetic
cauugaagacucugggauu

SEQ ID NO: 5798 - RNA, 19 nt, Artificial Sequence
  Synthetic
ggaaagggaaggagucaga

SEQ ID NO: 5799 - RNA, 19 nt, Artificial Sequence
  Synthetic
ggaaggagucagagcgcga

SEQ ID NO: 5800 - RNA, 19 nt, Artificial Sequence
  Synthetic
gaagaaagaagcugcugaa

SEQ ID NO: 5801 - RNA, 19 nt, Artificial Sequence
  Synthetic
gcuaugaagugaaagacau

SEQ ID NO: 5802 - RNA, 19 nt, Artificial Sequence
  Synthetic
guaccuaggucuucuuuaa

SEQ ID NO: 5803 - RNA, 19 nt, Artificial Sequence
  Synthetic
agaaagaagcugcugaaaa

SEQ ID NO: 5804 - RNA, 19 nt, Artificial Sequence
  Synthetic
gaucagugguucuuaaaca

SEQ ID NO: 5805 - RNA, 19 nt, Artificial Sequence
  Synthetic
ggaaguggacuaucauaaa

SEQ ID NO: 5806 - RNA, 19 nt, Artificial Sequence
  Synthetic
guuuagcuaugaagugaaa

SEQ ID NO: 5807 - RNA, 19 nt, Artificial Sequence
  Synthetic
ccagaagucuuacugauaa

SEQ ID NO: 5808 - RNA, 19 nt, Artificial Sequence
  Synthetic
gaaagaagcugcugaaaac

SEQ ID NO: 5809 - RNA, 19 nt, Artificial Sequence
  Synthetic
ggacuaucauaaaggucuu

SEQ ID NO: 5810 - RNA, 19 nt, Artificial Sequence
  Synthetic
uaacaaguucccaggauau

SEQ ID NO: 5811 - RNA, 19 nt, Artificial Sequence
  Synthetic
cccaggauauguugauuua

SEQ ID NO: 5812 - RNA, 19 nt, Artificial Sequence
  Synthetic
gugaaugcuguguaugaua

SEQ ID NO: 5813 - RNA, 19 nt, Artificial Sequence
  Synthetic
caagaaugugagagaacca

SEQ ID NO: 5814 - RNA, 19 nt, Artificial Sequence
  Synthetic
auugaagacucugggauua

SEQ ID NO: 5815 - RNA, 19 nt, Artificial Sequence
  Synthetic
cccagaagcuuaacuacua

SEQ ID NO: 5816 - RNA, 19 nt, Artificial Sequence
  Synthetic
cugauaacauaaacaguca

SEQ ID NO: 5817 - RNA, 19 nt, Artificial Sequence
  Synthetic
guagaucagugguucuuaa

SEQ ID NO: 5818 - RNA, 19 nt, Artificial Sequence
  Synthetic
aaacaaagaucuugaggaa

SEQ ID NO: 5819 - RNA, 19 nt, Artificial Sequence
  Synthetic
gggaagaggcagaaagaga

SEQ ID NO: 5820 - RNA, 19 nt, Artificial Sequence
  Synthetic
cauaauugcaguagcuaaa

SEQ ID NO: 5821 - RNA, 19 nt, Artificial Sequence
  Synthetic
gaagaaaccaccagcuuua

SEQ ID NO: 5822 - RNA, 19 nt, Artificial Sequence
  Synthetic
cagauggacucaacagaaa

SEQ ID NO: 5823 - RNA, 19 nt, Artificial Sequence
  Synthetic
ccagaugucuuuuggaauu

SEQ ID NO: 5824 - RNA, 19 nt, Artificial Sequence
  Synthetic
cuguagagaugcaagaaau

SEQ ID NO: 5825 - RNA, 19 nt, Artificial Sequence
  Synthetic
gagagaaacugucagagua

SEQ ID NO: 5826 - RNA, 19 nt, Artificial Sequence
  Synthetic
ccacacugcuccuggcuaa

SEQ ID NO: 5827 - RNA, 19 nt, Artificial Sequence
  Synthetic
agaaauugcugucccauaa

SEQ ID NO: 5828 - RNA, 19 nt, Artificial Sequence
  Synthetic
aguaauaacugaacaagca

SEQ ID NO: 5829 - RNA, 19 nt, Artificial Sequence
  Synthetic
cagagaacaacuugaauga

SEQ ID NO: 5830 - RNA, 19 nt, Artificial Sequence
  Synthetic
gagaacaacuugaaugacu

SEQ ID NO: 5831 - RNA, 19 nt, Artificial Sequence
  Synthetic
cugggaaccuguuaguaaa

SEQ ID NO: 5832 - RNA, 19 nt, Artificial Sequence
  Synthetic
ggccagagccggagaauag

SEQ ID NO: 5833 - RNA, 19 nt, Artificial Sequence
  Synthetic
caacaggaccccagagaga

SEQ ID NO: 5834 - RNA, 19 nt, Artificial Sequence
  Synthetic
gagggaagaggcagaaaga

SEQ ID NO: 5835 - RNA, 19 nt, Artificial Sequence
  Synthetic
acaaagggaugcaccaaau

SEQ ID NO: 5836 - RNA, 19 nt, Artificial Sequence
  Synthetic
gauauuugccacagcauuu

SEQ ID NO: 5837 - RNA, 19 nt, Artificial Sequence
  Synthetic
guacaguggcacaccuuaa

SEQ ID NO: 5838 - RNA, 19 nt, Artificial Sequence
  Synthetic
ggaagaaaccaccagcuuu

SEQ ID NO: 5839 - RNA, 19 nt, Artificial Sequence
  Synthetic
uggcuuaacucacagguuu

SEQ ID NO: 5840 - RNA, 19 nt, Artificial Sequence
  Synthetic
gaacauacagccgagaaua

SEQ ID NO: 5841 - RNA, 19 nt, Artificial Sequence
  Synthetic
gggaaagucuucacucaga

SEQ ID NO: 5842 - RNA, 19 nt, Artificial Sequence
  Synthetic
ggugagacauguggcuuaa

SEQ ID NO: 5843 - RNA, 19 nt, Artificial Sequence
  Synthetic
cagcccaacugcaugcaaa

SEQ ID NO: 5844 - RNA, 19 nt, Artificial Sequence
  Synthetic
gcagaaagagagaaacugu

SEQ ID NO: 5845 - RNA, 19 nt, Artificial Sequence
  Synthetic
ucugggaaccuguuaguaa

SEQ ID NO: 5846 - RNA, 19 nt, Artificial Sequence
  Synthetic
gaagaggcagaaagagaga

SEQ ID NO: 5847 - RNA, 19 nt, Artificial Sequence
  Synthetic
ccucagagaacaacuugaa

SEQ ID NO: 5848 - RNA, 19 nt, Artificial Sequence
  Synthetic
ucgacgagguccugaaaua

SEQ ID NO: 5849 - RNA, 19 nt, Artificial Sequence
  Synthetic
ggacaaaggaacaccagua

SEQ ID NO: 5850 - RNA, 19 nt, Artificial Sequence
  Synthetic
caaaggaacaccaguauua

SEQ ID NO: 5851 - RNA, 19 nt, Artificial Sequence
  Synthetic
gggcaaagaccacaaggaa

SEQ ID NO: 5852 - RNA, 19 nt, Artificial Sequence
  Synthetic
gcaaagaccacaaggaagu

SEQ ID NO: 5853 - RNA, 19 nt, Artificial Sequence
  Synthetic
ucuucaaguuugugggcaa

SEQ ID NO: 5854 - RNA, 19 nt, Artificial Sequence
  Synthetic
caauucaaaugcagacuaa

SEQ ID NO: 5855 - RNA, 19 nt, Artificial Sequence
  Synthetic
cuacagggccagacgcuaa

SEQ ID NO: 5856 - RNA, 19 nt, Artificial Sequence
  Synthetic
cuucaaggacaaugaguuu

SEQ ID NO: 5857 - RNA, 19 nt, Artificial Sequence
  Synthetic
ugaaaaugaaugugagcaa

SEQ ID NO: 5858 - RNA, 19 nt, Artificial Sequence
  Synthetic
cccaaugacuccuuaaaua

SEQ ID NO: 5859 - RNA, 19 nt, Artificial Sequence
  Synthetic
gcuaagaagugauggcaag

SEQ ID NO: 5860 - RNA, 19 nt, Artificial Sequence
  Synthetic
ggacuaguucguagccaua

SEQ ID NO: 5861 - RNA, 19 nt, Artificial Sequence
  Synthetic
agacaugcuuugaugaaaa

SEQ ID NO: 5862 - RNA, 19 nt, Artificial Sequence
  Synthetic
ggaauuuggaaguguauca

SEQ ID NO: 5863 - RNA, 19 nt, Artificial Sequence
  Synthetic
gugaagacguugaaggaug

SEQ ID NO: 5864 - RNA, 19 nt, Artificial Sequence
  Synthetic
uggagaucuucaaggacaa

SEQ ID NO: 5865 - RNA, 19 nt, Artificial Sequence
  Synthetic
gcaucgacugggaggacua

SEQ ID NO: 5866 - RNA, 19 nt, Artificial Sequence
  Synthetic
aaucagaagcuggguauaa

SEQ ID NO: 5867 - RNA, 19 nt, Artificial Sequence
  Synthetic
ccuagaaggcgacggcauu

SEQ ID NO: 5868 - RNA, 19 nt, Artificial Sequence
  Synthetic
acaccauuucugaaggaua

SEQ ID NO: 5869 - RNA, 19 nt, Artificial Sequence
  Synthetic
ucucaagacaugugguaca

SEQ ID NO: 5870 - RNA, 19 nt, Artificial Sequence
  Synthetic
cuggaaaucaugagccgaa

SEQ ID NO: 5871 - RNA, 19 nt, Artificial Sequence
  Synthetic
cuggagaucuucaaggaca

SEQ ID NO: 5872 - RNA, 19 nt, Artificial Sequence
  Synthetic
uggucgauguggugaauga

SEQ ID NO: 5873 - RNA, 19 nt, Artificial Sequence
  Synthetic
ccaaugacuccuuaaauau

SEQ ID NO: 5874 - RNA, 19 nt, Artificial Sequence
  Synthetic
gcagacaugcuuugaugaa

SEQ ID NO: 5875 - RNA, 19 nt, Artificial Sequence
  Synthetic
gagccgaaaucaugggauc

SEQ ID NO: 5876 - RNA, 19 nt, Artificial Sequence
  Synthetic
guugaaggaugccacaaua

SEQ ID NO: 5877 - RNA, 19 nt, Artificial Sequence
  Synthetic
uuucagaugacucgguaaa

SEQ ID NO: 5878 - RNA, 19 nt, Artificial Sequence
  Synthetic
gugcaaaucuguagaguaa

SEQ ID NO: 5879 - RNA, 19 nt, Artificial Sequence
  Synthetic
caagaaagguggcaaggua

SEQ ID NO: 5880 - RNA, 19 nt, Artificial Sequence
  Synthetic
gcaugugcauucagaaaua

SEQ ID NO: 5881 - RNA, 19 nt, Artificial Sequence
  Synthetic
agaggcaaauggagaguaa

SEQ ID NO: 5882 - RNA, 19 nt, Artificial Sequence
  Synthetic
gaguuaagccaguuagaau

SEQ ID NO: 5883 - RNA, 19 nt, Artificial Sequence
  Synthetic
gcucaaauucccaauauaa

SEQ ID NO: 5884 - RNA, 19 nt, Artificial Sequence
  Synthetic
gcaaaucuguagaguaaaa

SEQ ID NO: 5885 - RNA, 19 nt, Artificial Sequence
  Synthetic
caauauaaguggaccaguu

SEQ ID NO: 5886 - RNA, 19 nt, Artificial Sequence
  Synthetic
gcaugagaauucaacauaa

SEQ ID NO: 5887 - RNA, 19 nt, Artificial Sequence
  Synthetic
guauuuaaguccugcauuu

SEQ ID NO: 5888 - RNA, 19 nt, Artificial Sequence
  Synthetic
cgagaaaucaugagaaaug

SEQ ID NO: 5889 - RNA, 19 nt, Artificial Sequence
  Synthetic
gguagauucuugaccuuaa

SEQ ID NO: 5890 - RNA, 19 nt, Artificial Sequence
  Synthetic
uauagaugcucaugaagaa

SEQ ID NO: 5891 - RNA, 19 nt, Artificial Sequence
  Synthetic
gcaacagcuuggaagauga

SEQ ID NO: 5892 - RNA, 19 nt, Artificial Sequence
  Synthetic
gagaguaacagaagagugu

SEQ ID NO: 5893 - RNA, 19 nt, Artificial Sequence
  Synthetic
ugacagauacagaaaugaa

SEQ ID NO: 5894 - RNA, 19 nt, Artificial Sequence
  Synthetic
ccaugaguguugugacuga

SEQ ID NO: 5895 - RNA, 19 nt, Artificial Sequence
  Synthetic
ugacugacccuguaguaua

SEQ ID NO: 5896 - RNA, 19 nt, Artificial Sequence
  Synthetic
gcaaauggagaguaacaga

SEQ ID NO: 5897 - RNA, 19 nt, Artificial Sequence
  Synthetic
gaagaaagaucugcuacaa

SEQ ID NO: 5898 - RNA, 19 nt, Artificial Sequence
  Synthetic
ucuccaauguguuguguuu

SEQ ID NO: 5899 - RNA, 19 nt, Artificial Sequence
  Synthetic
aagcagggcuaauuccaaa

SEQ ID NO: 5900 - RNA, 19 nt, Artificial Sequence
  Synthetic
gacaaggacuccacuuaua

SEQ ID NO: 5901 - RNA, 19 nt, Artificial Sequence
  Synthetic
ugucagaucuguuucaauu

SEQ ID NO: 5902 - RNA, 19 nt, Artificial Sequence
  Synthetic
caggagggcgcuuggauuu

SEQ ID NO: 5903 - RNA, 19 nt, Artificial Sequence
  Synthetic
caagauaccaggugaauug

SEQ ID NO: 5904 - RNA, 19 nt, Artificial Sequence
  Synthetic
ccucauaaacugucaaaug

SEQ ID NO: 5905 - RNA, 19 nt, Artificial Sequence
  Synthetic
ggugacagauacagaaaug

SEQ ID NO: 5906 - RNA, 19 nt, Artificial Sequence
  Synthetic
ggguagagauuuauguauu

SEQ ID NO: 5907 - RNA, 19 nt, Artificial Sequence
  Synthetic
gggaaaauauagcagguua

SEQ ID NO: 5908 - RNA, 19 nt, Artificial Sequence
  Synthetic
ccaaaucagacaugcgaua

SEQ ID NO: 5909 - RNA, 19 nt, Artificial Sequence
  Synthetic
ggacagagaaugcaacaau

SEQ ID NO: 5910 - RNA, 19 nt, Artificial Sequence
  Synthetic
aguaugaaguggaaugaau

SEQ ID NO: 5911 - RNA, 19 nt, Artificial Sequence
  Synthetic
acagauggacuuaguguua

SEQ ID NO: 5912 - RNA, 19 nt, Artificial Sequence
  Synthetic
gaaugcaacaauauggaaa

SEQ ID NO: 5913 - RNA, 19 nt, Artificial Sequence
  Synthetic
ggcagagaaugaagaagaa

SEQ ID NO: 5914 - RNA, 19 nt, Artificial Sequence
  Synthetic
guauugagcacuaguggaa

SEQ ID NO: 5915 - RNA, 19 nt, Artificial Sequence
  Synthetic
uggagaagccagaguauga

SEQ ID NO: 5916 - RNA, 19 nt, Artificial Sequence
  Synthetic
uggcagagaaugaagaaga

SEQ ID NO: 5917 - RNA, 19 nt, Artificial Sequence
  Synthetic
ccauggagccguaagaaga

SEQ ID NO: 5918 - RNA, 19 nt, Artificial Sequence
  Synthetic
ugaaagagaucucagacuu

SEQ ID NO: 5919 - RNA, 19 nt, Artificial Sequence
  Synthetic
gcagugaccuagagaguuc

SEQ ID NO: 5920 - RNA, 19 nt, Artificial Sequence
  Synthetic
ugucaaagaguguacauau

SEQ ID NO: 5921 - RNA, 19 nt, Artificial Sequence
  Synthetic
gaaugaagaagaagguagu

SEQ ID NO: 5922 - RNA, 19 nt, Artificial Sequence
  Synthetic
gugcauacauuaucaagau

SEQ ID NO: 5923 - RNA, 19 nt, Artificial Sequence
  Synthetic
guguguauauugaaugcua

SEQ ID NO: 5924 - RNA, 19 nt, Artificial Sequence
  Synthetic
cuggagagcccucaagaau

SEQ ID NO: 5925 - RNA, 19 nt, Artificial Sequence
  Synthetic
gaaaaggagugaaaauuga

SEQ ID NO: 5926 - RNA, 19 nt, Artificial Sequence
  Synthetic
gacagagaaugcaacaaua

SEQ ID NO: 5927 - RNA, 19 nt, Artificial Sequence
  Synthetic
guuaggaaauggagaggua

SEQ ID NO: 5928 - RNA, 19 nt, Artificial Sequence
  Synthetic
agacagaagauuuggauga

SEQ ID NO: 5929 - RNA, 19 nt, Artificial Sequence
  Synthetic
cugaagaacagcacaauaa

SEQ ID NO: 5930 - RNA, 19 nt, Artificial Sequence
  Synthetic
ggugaagagaagacauuaa

SEQ ID NO: 5931 - RNA, 19 nt, Artificial Sequence
  Synthetic
aggacugccugaagaguaa

SEQ ID NO: 5932 - RNA, 19 nt, Artificial Sequence
  Synthetic
caugaugaagccagagaaa

SEQ ID NO: 5933 - RNA, 19 nt, Artificial Sequence
  Synthetic
gaagagagcauuugcaaaa

SEQ ID NO: 5934 - RNA, 19 nt, Artificial Sequence
  Synthetic
caaacgaucugaaggugaa

SEQ ID NO: 5935 - RNA, 19 nt, Artificial Sequence
  Synthetic
caguacagccuuucaguaa

SEQ ID NO: 5936 - RNA, 19 nt, Artificial Sequence
  Synthetic
gagaaaagaugcugacuca

SEQ ID NO: 5937 - RNA, 19 nt, Artificial Sequence
  Synthetic
cagacagaauucagcacua

SEQ ID NO: 5938 - RNA, 19 nt, Artificial Sequence
  Synthetic
gcacugucuuacugauuua

SEQ ID NO: 5939 - RNA, 19 nt, Artificial Sequence
  Synthetic
aaguaaaguuguugacagu

SEQ ID NO: 5940 - RNA, 19 nt, Artificial Sequence
  Synthetic
gaucugaaggugaagagaa

SEQ ID NO: 5941 - RNA, 19 nt, Artificial Sequence
  Synthetic
cugcaguacuguaugaaaa

SEQ ID NO: 5942 - RNA, 19 nt, Artificial Sequence
  Synthetic
gguaaguugcauucauuua

SEQ ID NO: 5943 - RNA, 19 nt, Artificial Sequence
  Synthetic
guucaguacuccaaauuau

SEQ ID NO: 5944 - RNA, 19 nt, Artificial Sequence
  Synthetic
agaaaacaguggcgacuua

SEQ ID NO: 5945 - RNA, 19 nt, Artificial Sequence
  Synthetic
aaucauauuuggcagguau

SEQ ID NO: 5946 - RNA, 19 nt, Artificial Sequence
  Synthetic
acgaacugcaccaaagaaa

SEQ ID NO: 5947 - RNA, 19 nt, Artificial Sequence
  Synthetic
caggugagcuggaugugaa

SEQ ID NO: 5948 - RNA, 19 nt, Artificial Sequence
  Synthetic
agagagagcagguuccaua

SEQ ID NO: 5949 - RNA, 19 nt, Artificial Sequence
  Synthetic
gcaaacgaucugaagguga

SEQ ID NO: 5950 - RNA, 19 nt, Artificial Sequence
  Synthetic
ggaugugaagagagcauuu

SEQ ID NO: 5951 - RNA, 19 nt, Artificial Sequence
  Synthetic
ugaagagagcauuugcaaa

SEQ ID NO: 5952 - RNA, 19 nt, Artificial Sequence
  Synthetic
guaaaguuguugacagugu

SEQ ID NO: 5953 - RNA, 19 nt, Artificial Sequence
  Synthetic
gagaaaugucuuuaguuca

SEQ ID NO: 5954 - RNA, 19 nt, Artificial Sequence
  Synthetic
auguaugcaaggagaguuu

SEQ ID NO: 5955 - RNA, 19 nt, Artificial Sequence
  Synthetic
cagaagauuuggaugauac

SEQ ID NO: 5956 - RNA, 19 nt, Artificial Sequence
  Synthetic
gcaauuagcuuuucuccau

SEQ ID NO: 5957 - RNA, 19 nt, Artificial Sequence
  Synthetic
guagaaugguuuugaagaa

SEQ ID NO: 5958 - RNA, 19 nt, Artificial Sequence
  Synthetic
ccaagaaagccaucaguaa

SEQ ID NO: 5959 - RNA, 19 nt, Artificial Sequence
  Synthetic
caagaaagccaucaguaaa

SEQ ID NO: 5960 - RNA, 19 nt, Artificial Sequence
  Synthetic
gacaauagcuguuggaacu

SEQ ID NO: 5961 - RNA, 19 nt, Artificial Sequence
  Synthetic
cuugaaugcuaaugaggua

SEQ ID NO: 5962 - RNA, 19 nt, Artificial Sequence
  Synthetic
cagaagaucagguacacaa

SEQ ID NO: 5963 - RNA, 19 nt, Artificial Sequence
  Synthetic
gaaugguuuugaagaagaa

SEQ ID NO: 5964 - RNA, 19 nt, Artificial Sequence
  Synthetic
caacauugcaguaacaaaa

SEQ ID NO: 5965 - RNA, 19 nt, Artificial Sequence
  Synthetic
cuaaugagguagaaugguu

SEQ ID NO: 5966 - RNA, 19 nt, Artificial Sequence
  Synthetic
gaauugagggguaaggaua

SEQ ID NO: 5967 - RNA, 19 nt, Artificial Sequence
  Synthetic
ggaaacugacccagacuuu

SEQ ID NO: 5968 - RNA, 19 nt, Artificial Sequence
  Synthetic
ccacggaguugcugaucau

SEQ ID NO: 5969 - RNA, 19 nt, Artificial Sequence
  Synthetic
gaacauuguaccuguccua

SEQ ID NO: 5970 - RNA, 19 nt, Artificial Sequence
  Synthetic
agaaaucaacauugcagua

SEQ ID NO: 5971 - RNA, 19 nt, Artificial Sequence
  Synthetic
uaacagaauugagggguaa

SEQ ID NO: 5972 - RNA, 19 nt, Artificial Sequence
  Synthetic
cagagaacaucgaggucaa

SEQ ID NO: 5973 - RNA, 19 nt, Artificial Sequence
  Synthetic
ggucaaggaaggaggguug

SEQ ID NO: 5974 - RNA, 19 nt, Artificial Sequence
  Synthetic
ccacuuggagggaggaaga

SEQ ID NO: 5975 - RNA, 19 nt, Artificial Sequence
  Synthetic
cccaaagacuguucagaga

SEQ ID NO: 5976 - RNA, 19 nt, Artificial Sequence
  Synthetic
ccaaagacuguucagagaa

SEQ ID NO: 5977 - RNA, 19 nt, Artificial Sequence
  Synthetic
aggagggaacucugggcua

SEQ ID NO: 5978 - RNA, 19 nt, Artificial Sequence
  Synthetic
gagcucaacuuucagaaga

SEQ ID NO: 5979 - RNA, 19 nt, Artificial Sequence
  Synthetic
cagcgggaacucaggguga

SEQ ID NO: 5980 - RNA, 19 nt, Artificial Sequence
  Synthetic
uggaggugccagagagacu

SEQ ID NO: 5981 - RNA, 19 nt, Artificial Sequence
  Synthetic
cuaccugggcgaaaggaga

SEQ ID NO: 5982 - RNA, 19 nt, Artificial Sequence
  Synthetic
uggacauggaggagggaac

SEQ ID NO: 5983 - RNA, 19 nt, Artificial Sequence
  Synthetic
ccuuccaggucaauccaaa

SEQ ID NO: 5984 - RNA, 19 nt, Artificial Sequence
  Synthetic
gaacaucgaggucaaggaa

SEQ ID NO: 5985 - RNA, 19 nt, Artificial Sequence
  Synthetic
aacccaagcucugcggaaa

SEQ ID NO: 5986 - RNA, 19 nt, Artificial Sequence
  Synthetic
ccaaacuggagcucaacuu

SEQ ID NO: 5987 - RNA, 19 nt, Artificial Sequence
  Synthetic
ggacauggaggagggaacu

SEQ ID NO: 5988 - RNA, 19 nt, Artificial Sequence
  Synthetic
gcucaacuuucagaagaga

SEQ ID NO: 5989 - RNA, 19 nt, Artificial Sequence
  Synthetic
gagcucccuuccaggucaa

SEQ ID NO: 5990 - RNA, 19 nt, Artificial Sequence
  Synthetic
ggaaggaggguuguacuuu

SEQ ID NO: 5991 - RNA, 19 nt, Artificial Sequence
  Synthetic
aaggaggguuguacuuuga

SEQ ID NO: 5992 - RNA, 19 nt, Artificial Sequence
  Synthetic
gaaggaggguuguacuuug

SEQ ID NO: 5993 - RNA, 19 nt, Artificial Sequence
  Synthetic
gaacucugggcuacgcuau

SEQ ID NO: 5994 - RNA, 19 nt, Artificial Sequence
  Synthetic
caagcucugcggaaaucaa

SEQ ID NO: 5995 - RNA, 19 nt, Artificial Sequence
  Synthetic
gggaagcuguaccaucaga

SEQ ID NO: 5996 - RNA, 19 nt, Artificial Sequence
  Synthetic
caaacuggagcucaacuuu

SEQ ID NO: 5997 - RNA, 19 nt, Artificial Sequence
  Synthetic
aacuggagcucaacuuuca

SEQ ID NO: 5998 - RNA, 19 nt, Artificial Sequence
  Synthetic
ggagcucaacuuucagaag

SEQ ID NO: 5999 - RNA, 19 nt, Artificial Sequence
  Synthetic
gcugcagacugaccacuac

SEQ ID NO: 6000 - RNA, 19 nt, Artificial Sequence
  Synthetic
gcuggugguucuggacaug

SEQ ID NO: 6001 - RNA, 19 nt, Artificial Sequence
  Synthetic
caaggaaggaggguuguac

SEQ ID NO: 6002 - RNA, 19 nt, Artificial Sequence
  Synthetic
agucauggucagagagaua

SEQ ID NO: 6003 - RNA, 19 nt, Artificial Sequence
  Synthetic
cagaagaaauguaugagua

SEQ ID NO: 6004 - RNA, 19 nt, Artificial Sequence
  Synthetic
agaaaugggcagaagaaau

SEQ ID NO: 6005 - RNA, 19 nt, Artificial Sequence
  Synthetic
gagaagaaggcauggguca

SEQ ID NO: 6006 - RNA, 19 nt, Artificial Sequence
  Synthetic
uggaguugcccgaggauaa

SEQ ID NO: 6007 - RNA, 19 nt, Artificial Sequence
  Synthetic
guuaaagaaaggagcaaau

SEQ ID NO: 6008 - RNA, 19 nt, Artificial Sequence
  Synthetic
gcugugaaguugugucaaa

SEQ ID NO: 6009 - RNA, 19 nt, Artificial Sequence
  Synthetic
agacaguggugcugauauu

SEQ ID NO: 6010 - RNA, 19 nt, Artificial Sequence
  Synthetic
ggacagaacuacuccauga

SEQ ID NO: 6011 - RNA, 19 nt, Artificial Sequence
  Synthetic
ggguggaaguggauugcaa

SEQ ID NO: 6012 - RNA, 19 nt, Artificial Sequence
  Synthetic
cagaaauugaugugaguga

SEQ ID NO: 6013 - RNA, 19 nt, Artificial Sequence
  Synthetic
gggcagaagaaauguauga

SEQ ID NO: 6014 - RNA, 19 nt, Artificial Sequence
  Synthetic
ugaucugggucuagaacua

SEQ ID NO: 6015 - RNA, 19 nt, Artificial Sequence
  Synthetic
caagaaaugggcagaagaa

SEQ ID NO: 6016 - RNA, 19 nt, Artificial Sequence
  Synthetic
gcaaauugugcaaagcuaa

SEQ ID NO: 6017 - RNA, 19 nt, Artificial Sequence
  Synthetic
cugcaaacaugaugaaguu

SEQ ID NO: 6018 - RNA, 19 nt, Artificial Sequence
  Synthetic
gggaaguuguagaagacau

SEQ ID NO: 6019 - RNA, 19 nt, Artificial Sequence
  Synthetic
gaacaacuuuucagccuaa

SEQ ID NO: 6020 - RNA, 19 nt, Artificial Sequence
  Synthetic
ugucaagauucaugcauau

SEQ ID NO: 6021 - RNA, 19 nt, Artificial Sequence
  Synthetic
ggacagacuucuuguggca

SEQ ID NO: 6022 - RNA, 19 nt, Artificial Sequence
  Synthetic
agugaaagccaguaccuaa

SEQ ID NO: 6023 - RNA, 19 nt, Artificial Sequence
  Synthetic
ggguggauauggagagacu

SEQ ID NO: 6024 - RNA, 19 nt, Artificial Sequence
  Synthetic
aaugaagaccuccgagaaa

SEQ ID NO: 6025 - RNA, 19 nt, Artificial Sequence
  Synthetic
gaugugagugauuggauaa

SEQ ID NO: 6026 - RNA, 19 nt, Artificial Sequence
  Synthetic
gaaauugaugugagugauu

SEQ ID NO: 6027 - RNA, 19 nt, Artificial Sequence
  Synthetic
ggaaguuguagaagacauu

SEQ ID NO: 6028 - RNA, 19 nt, Artificial Sequence
  Synthetic
ugaugugagugauuggaua

SEQ ID NO: 6029 - RNA, 19 nt, Artificial Sequence
  Synthetic
aagagaagauccaguuauu

SEQ ID NO: 6030 - RNA, 19 nt, Artificial Sequence
  Synthetic
ggagagagcgauggagcaa

SEQ ID NO: 6031 - RNA, 19 nt, Artificial Sequence
  Synthetic
caauaucacccgaggcuuu

SEQ ID NO: 6032 - RNA, 19 nt, Artificial Sequence
  Synthetic
gggaaugaguccugguaua

SEQ ID NO: 6033 - RNA, 19 nt, Artificial Sequence
  Synthetic
gagcacagcuauauuuuaa

SEQ ID NO: 6034 - RNA, 19 nt, Artificial Sequence
  Synthetic
ucacacugacaaugaguua

SEQ ID NO: 6035 - RNA, 19 nt, Artificial Sequence
  Synthetic
caagauauagaccguauua

SEQ ID NO: 6036 - RNA, 19 nt, Artificial Sequence
  Synthetic
agacaaaggaagagagcua

SEQ ID NO: 6037 - RNA, 19 nt, Artificial Sequence
  Synthetic
gcacaaagauugaguccaa

SEQ ID NO: 6038 - RNA, 19 nt, Artificial Sequence
  Synthetic
ggaaaugcauugucagaaa

SEQ ID NO: 6039 - RNA, 19 nt, Artificial Sequence
  Synthetic
gauagaaagugaugaggaa

SEQ ID NO: 6040 - RNA, 19 nt, Artificial Sequence
  Synthetic
ccauuaaaguugaggugaa

SEQ ID NO: 6041 - RNA, 19 nt, Artificial Sequence
  Synthetic
gaacagaaagaaagugaaa

SEQ ID NO: 6042 - RNA, 19 nt, Artificial Sequence
  Synthetic
gccaauuggucgagacaaa

SEQ ID NO: 6043 - RNA, 19 nt, Artificial Sequence
  Synthetic
ucacgaaauuacugagaaa

SEQ ID NO: 6044 - RNA, 19 nt, Artificial Sequence
  Synthetic
uggcauagaugaugauuua

SEQ ID NO: 6045 - RNA, 19 nt, Artificial Sequence
  Synthetic
gcgacgugguaaagaaaua

SEQ ID NO: 6046 - RNA, 19 nt, Artificial Sequence
  Synthetic
aagaagaucuccaagaaua

SEQ ID NO: 6047 - RNA, 19 nt, Artificial Sequence
  Synthetic
cagaaaaggaagaggagaa

SEQ ID NO: 6048 - RNA, 19 nt, Artificial Sequence
  Synthetic
gguaaaacccaaaggcaaa

SEQ ID NO: 6049 - RNA, 19 nt, Artificial Sequence
  Synthetic
gaaaggaggucaacaagaa

SEQ ID NO: 6050 - RNA, 19 nt, Artificial Sequence
  Synthetic
aagcaagagaagacagaaa

SEQ ID NO: 6051 - RNA, 19 nt, Artificial Sequence
  Synthetic
gagaagaugagguggaaga

SEQ ID NO: 6052 - RNA, 19 nt, Artificial Sequence
  Synthetic
ggaagaaacaccuaaacaa

SEQ ID NO: 6053 - RNA, 19 nt, Artificial Sequence
  Synthetic
agaagagacuacugugaaa

SEQ ID NO: 6054 - RNA, 19 nt, Artificial Sequence
  Synthetic
gggcaugggagauggagaa

SEQ ID NO: 6055 - RNA, 19 nt, Artificial Sequence
  Synthetic
caggugagcuugagaaaga

SEQ ID NO: 6056 - RNA, 19 nt, Artificial Sequence
  Synthetic
cuacagauuugaugaguuu

SEQ ID NO: 6057 - RNA, 19 nt, Artificial Sequence
  Synthetic
ugagaaaucuacugaagaa

SEQ ID NO: 6058 - RNA, 19 nt, Artificial Sequence
  Synthetic
uggagaaguuagugaugaa

SEQ ID NO: 6059 - RNA, 19 nt, Artificial Sequence
  Synthetic
caagaggaacagaaagaaa

SEQ ID NO: 6060 - RNA, 19 nt, Artificial Sequence
  Synthetic
cagaagaggaggaagaaaa

SEQ ID NO: 6061 - RNA, 19 nt, Artificial Sequence
  Synthetic
ggaggaagaggaaggcaaa

SEQ ID NO: 6062 - RNA, 19 nt, Artificial Sequence
  Synthetic
guagaaugccagaguacaa

SEQ ID NO: 6063 - RNA, 19 nt, Artificial Sequence
  Synthetic
caagauaugccaagaguuu

SEQ ID NO: 6064 - RNA, 19 nt, Artificial Sequence
  Synthetic
agaugaaagugaagaagau

SEQ ID NO: 6065 - RNA, 19 nt, Artificial Sequence
  Synthetic
cagaagaggaggaagauga

SEQ ID NO: 6066 - RNA, 19 nt, Artificial Sequence
  Synthetic
agauaaagguggugauaua

SEQ ID NO: 6067 - RNA, 19 nt, Artificial Sequence
  Synthetic
acaaagagcucgaggccaa

SEQ ID NO: 6068 - RNA, 19 nt, Artificial Sequence
  Synthetic
cuacaauacuaguggaaau

SEQ ID NO: 6069 - RNA, 19 nt, Artificial Sequence
  Synthetic
ggauaaugcagaagaauau

SEQ ID NO: 6070 - RNA, 19 nt, Artificial Sequence
  Synthetic
gagaacacuuggagagauu

SEQ ID NO: 6071 - RNA, 19 nt, Artificial Sequence
  Synthetic
cuaaagaagcagaagcuaa

SEQ ID NO: 6072 - RNA, 19 nt, Artificial Sequence
  Synthetic
gaacaugggaugaugauua

SEQ ID NO: 6073 - RNA, 19 nt, Artificial Sequence
  Synthetic
ugaagaagaugaugagaau

SEQ ID NO: 6074 - RNA, 19 nt, Artificial Sequence
  Synthetic
guaaguauauuuagggcua

SEQ ID NO: 6075 - RNA, 19 nt, Artificial Sequence
  Synthetic
gcacaaacauuucagcaaa

SEQ ID NO: 6076 - RNA, 19 nt, Artificial Sequence
  Synthetic
cagaagaauauguggauuu

SEQ ID NO: 6077 - RNA, 19 nt, Artificial Sequence
  Synthetic
cauacuaagucgugauaau

SEQ ID NO: 6078 - RNA, 19 nt, Artificial Sequence
  Synthetic
ccuaugagcucuagugcaa

SEQ ID NO: 6079 - RNA, 19 nt, Artificial Sequence
  Synthetic
gaacuuaacaacaggacua

SEQ ID NO: 6080 - RNA, 19 nt, Artificial Sequence
  Synthetic
ggaacaaagucuggguuaa

SEQ ID NO: 6081 - RNA, 19 nt, Artificial Sequence
  Synthetic
gcggaaacgggaagugaaa

SEQ ID NO: 6082 - RNA, 19 nt, Artificial Sequence
  Synthetic
cauagaggauuuagguuua

SEQ ID NO: 6083 - RNA, 19 nt, Artificial Sequence
  Synthetic
guuaauagcuguacuagaa

SEQ ID NO: 6084 - RNA, 19 nt, Artificial Sequence
  Synthetic
ccaggaagauggugaugaa

SEQ ID NO: 6085 - RNA, 19 nt, Artificial Sequence
  Synthetic
gagagaugaagaugggaaa

SEQ ID NO: 6086 - RNA, 19 nt, Artificial Sequence
  Synthetic
gaacaaagucuggguuaaa

SEQ ID NO: 6087 - RNA, 19 nt, Artificial Sequence
  Synthetic
caccaaaggaugagaaaca

SEQ ID NO: 6088 - RNA, 19 nt, Artificial Sequence
  Synthetic
gcauagaggauuuagguuu

SEQ ID NO: 6089 - RNA, 19 nt, Artificial Sequence
  Synthetic
acaaucauguacagagaaa

SEQ ID NO: 6090 - RNA, 19 nt, Artificial Sequence
  Synthetic
ccgaggagaucaugagaga

SEQ ID NO: 6091 - RNA, 19 nt, Artificial Sequence
  Synthetic
ggucaaaggucaucaucau

SEQ ID NO: 6092 - RNA, 19 nt, Artificial Sequence
  Synthetic
ugaaagugcuccagacaau

SEQ ID NO: 6093 - RNA, 19 nt, Artificial Sequence
  Synthetic
agaagaaggucaugauuca

SEQ ID NO: 6094 - RNA, 19 nt, Artificial Sequence
  Synthetic
cuguaauggcaaugugaaa

SEQ ID NO: 6095 - RNA, 19 nt, Artificial Sequence
  Synthetic
cagaaauuguaauggaaca

SEQ ID NO: 6096 - RNA, 19 nt, Artificial Sequence
  Synthetic
gagcaaagaggaagagaaa

SEQ ID NO: 6097 - RNA, 19 nt, Artificial Sequence
  Synthetic
ucaaauaacagaagggaaa

SEQ ID NO: 6098 - RNA, 19 nt, Artificial Sequence
  Synthetic
aguuagagcuugcgggaaa

SEQ ID NO: 6099 - RNA, 19 nt, Artificial Sequence
  Synthetic
acuaauggcugaaggauaa

SEQ ID NO: 6100 - RNA, 19 nt, Artificial Sequence
  Synthetic
gaggaagguuuuagugaaa

SEQ ID NO: 6101 - RNA, 19 nt, Artificial Sequence
  Synthetic
gggacaagcuccagaucua

SEQ ID NO: 6102 - RNA, 19 nt, Artificial Sequence
  Synthetic
caaagaagacagugugaaa

SEQ ID NO: 6103 - RNA, 19 nt, Artificial Sequence
  Synthetic
gcaagaagacggugaagaa

SEQ ID NO: 6104 - RNA, 19 nt, Artificial Sequence
  Synthetic
ggaaauaccucuaacaaaa

SEQ ID NO: 6105 - RNA, 19 nt, Artificial Sequence
  Synthetic
ggaagaagaagaugagaau

SEQ ID NO: 6106 - RNA, 19 nt, Artificial Sequence
  Synthetic
ggaaauaguucaacacaga

SEQ ID NO: 6107 - RNA, 19 nt, Artificial Sequence
  Synthetic
gugaauaucuggcaaguua

SEQ ID NO: 6108 - RNA, 19 nt, Artificial Sequence
  Synthetic
caaauuaugucuugggcaa

SEQ ID NO: 6109 - RNA, 19 nt, Artificial Sequence
  Synthetic
gagaagaaguggugcagau

SEQ ID NO: 6110 - RNA, 19 nt, Artificial Sequence
  Synthetic
ugaagaaaguggugcggua

SEQ ID NO: 6111 - RNA, 19 nt, Artificial Sequence
  Synthetic
aaucagaugaagaggguua

SEQ ID NO: 6112 - RNA, 19 nt, Artificial Sequence
  Synthetic
gagaggagaaggagagcaa

SEQ ID NO: 6113 - RNA, 19 nt, Artificial Sequence
  Synthetic
gcaaguuaauggaggaaaa

SEQ ID NO: 6114 - RNA, 19 nt, Artificial Sequence
  Synthetic
ccaaauagcgagacaagua

SEQ ID NO: 6115 - RNA, 19 nt, Artificial Sequence
  Synthetic
ggaaggaggcaaaguuuaa

SEQ ID NO: 6116 - RNA, 19 nt, Artificial Sequence
  Synthetic
ggaaauugaucuugaugau

SEQ ID NO: 6117 - RNA, 19 nt, Artificial Sequence
  Synthetic
ggaaggaaguuauggcaga

SEQ ID NO: 6118 - RNA, 19 nt, Artificial Sequence
  Synthetic
ggcagaagcuggaagaaau

SEQ ID NO: 6119 - RNA, 19 nt, Artificial Sequence
  Synthetic
caaacaugcuauucagaua

SEQ ID NO: 6120 - RNA, 19 nt, Artificial Sequence
  Synthetic
ccagagugcugauggcaaa

SEQ ID NO: 6121 - RNA, 19 nt, Artificial Sequence
  Synthetic
guggagaaacugagaagaa

SEQ ID NO: 6122 - RNA, 19 nt, Artificial Sequence
  Synthetic
uggaaaagauggugaauau

SEQ ID NO: 6123 - RNA, 19 nt, Artificial Sequence
  Synthetic
ggucagaagcuaaagaaaa

SEQ ID NO: 6124 - RNA, 19 nt, Artificial Sequence
  Synthetic
cagauuaggacaaggaaau

SEQ ID NO: 6125 - RNA, 19 nt, Artificial Sequence
  Synthetic
gcuaacuggugaagaagaa

SEQ ID NO: 6126 - RNA, 19 nt, Artificial Sequence
  Synthetic
ggucagaacuguagaaaua

SEQ ID NO: 6127 - RNA, 19 nt, Artificial Sequence
  Synthetic
gguuaaagauggagaaauu

SEQ ID NO: 6128 - RNA, 19 nt, Artificial Sequence
  Synthetic
gaagaaacaaggaaggaaa

SEQ ID NO: 6129 - RNA, 19 nt, Artificial Sequence
  Synthetic
cugaaaggcuccaagauaa

SEQ ID NO: 6130 - RNA, 19 nt, Artificial Sequence
  Synthetic
gagcugauuucuugaguaa

SEQ ID NO: 6131 - RNA, 19 nt, Artificial Sequence
  Synthetic
ggaugaucaugaagaguua

SEQ ID NO: 6132 - RNA, 19 nt, Artificial Sequence
  Synthetic
cagaaugaacugugacaaa

SEQ ID NO: 6133 - RNA, 19 nt, Artificial Sequence
  Synthetic
ccaaacacauagugggaau

SEQ ID NO: 6134 - RNA, 19 nt, Artificial Sequence
  Synthetic
gaggauagcucaaaagaua

SEQ ID NO: 6135 - RNA, 19 nt, Artificial Sequence
  Synthetic
gugacaacguugaggaaga

SEQ ID NO: 6136 - RNA, 19 nt, Artificial Sequence
  Synthetic
ugaaaugccucguggagaa

SEQ ID NO: 6137 - RNA, 19 nt, Artificial Sequence
  Synthetic
cuguagaaauaaugaggaa

SEQ ID NO: 6138 - RNA, 19 nt, Artificial Sequence
  Synthetic
gcucaggaaucgauuguaa

SEQ ID NO: 6139 - RNA, 19 nt, Artificial Sequence
  Synthetic
ggaaugaaaugguuaaaga

SEQ ID NO: 6140 - RNA, 19 nt, Artificial Sequence
  Synthetic
cgaaggugauguuggcaaa

SEQ ID NO: 6141 - RNA, 19 nt, Artificial Sequence
  Synthetic
gggaugaguuaaaguggaa

SEQ ID NO: 6142 - RNA, 19 nt, Artificial Sequence
  Synthetic
ggaaauaacuguguaacaa

SEQ ID NO: 6143 - RNA, 19 nt, Artificial Sequence
  Synthetic
gggagaggacggauggaua

SEQ ID NO: 6144 - RNA, 19 nt, Artificial Sequence
  Synthetic
gguacaacgaggagaaaga

SEQ ID NO: 6145 - RNA, 19 nt, Artificial Sequence
  Synthetic
agaaagaagaucugaauga

SEQ ID NO: 6146 - RNA, 19 nt, Artificial Sequence
  Synthetic
gagaaaggcaacagcggaa

SEQ ID NO: 6147 - RNA, 19 nt, Artificial Sequence
  Synthetic
gcaagaggcuggagcugua

SEQ ID NO: 6148 - RNA, 19 nt, Artificial Sequence
  Synthetic
gcgaaggugacgauggaaa

SEQ ID NO: 6149 - RNA, 19 nt, Artificial Sequence
  Synthetic
gcggaagccucauuagaaa

SEQ ID NO: 6150 - RNA, 19 nt, Artificial Sequence
  Synthetic
gcugaaaggcuccaagaua

SEQ ID NO: 6151 - RNA, 19 nt, Artificial Sequence
  Synthetic
ggugaaaggucuuccagaa

SEQ ID NO: 6152 - RNA, 19 nt, Artificial Sequence
  Synthetic
ggaagaagaucgugcaugu

SEQ ID NO: 6153 - RNA, 19 nt, Artificial Sequence
  Synthetic
ggacagagauggauugcau

SEQ ID NO: 6154 - RNA, 19 nt, Artificial Sequence
  Synthetic
gcaaguaauucuaagccaa

SEQ ID NO: 6155 - RNA, 19 nt, Artificial Sequence
  Synthetic
ugauagacacagagaggaa

SEQ ID NO: 6156 - RNA, 19 nt, Artificial Sequence
  Synthetic
gcuccaaauacgagaauua

SEQ ID NO: 6157 - RNA, 19 nt, Artificial Sequence
  Synthetic
gcaccaaccugcagggaau

SEQ ID NO: 6158 - RNA, 19 nt, Artificial Sequence
  Synthetic
gcugauggguagugaagua

SEQ ID NO: 6159 - RNA, 19 nt, Artificial Sequence
  Synthetic
gaaacaagccagaacaaau

SEQ ID NO: 6160 - RNA, 19 nt, Artificial Sequence
  Synthetic
uggcagaacuccuaagaau

SEQ ID NO: 6161 - RNA, 19 nt, Artificial Sequence
  Synthetic
cgagaaagcuauggaguga

SEQ ID NO: 6162 - RNA, 19 nt, Artificial Sequence
  Synthetic
gcaaaguacuugagcucuu

SEQ ID NO: 6163 - RNA, 19 nt, Artificial Sequence
  Synthetic
ccagcaaaguacuagauaa

SEQ ID NO: 6164 - RNA, 19 nt, Artificial Sequence
  Synthetic
gcacauuauaccaguuuaa

SEQ ID NO: 6165 - RNA, 19 nt, Artificial Sequence
  Synthetic
gaugaaggauuguagauuu

SEQ ID NO: 6166 - RNA, 19 nt, Artificial Sequence
  Synthetic
gggcacacuuguaauguua

SEQ ID NO: 6167 - RNA, 19 nt, Artificial Sequence
  Synthetic
uccaagagcuuuuagauua

SEQ ID NO: 6168 - RNA, 19 nt, Artificial Sequence
  Synthetic
ggaaaggacugcuucagaa

SEQ ID NO: 6169 - RNA, 19 nt, Artificial Sequence
  Synthetic
caugauucccugaaagaua

SEQ ID NO: 6170 - RNA, 19 nt, Artificial Sequence
  Synthetic
aggaauuuguggaugcuua

SEQ ID NO: 6171 - RNA, 19 nt, Artificial Sequence
  Synthetic
caaugguguuguucagaua

SEQ ID NO: 6172 - RNA, 19 nt, Artificial Sequence
  Synthetic
gagcauucauucugauauu

SEQ ID NO: 6173 - RNA, 19 nt, Artificial Sequence
  Synthetic
gcuguugacuucaggacua

SEQ ID NO: 6174 - RNA, 19 nt, Artificial Sequence
  Synthetic
guaacugugugcaaggaua

SEQ ID NO: 6175 - RNA, 19 nt, Artificial Sequence
  Synthetic
guacagcagcaaagagauu

SEQ ID NO: 6176 - RNA, 19 nt, Artificial Sequence
  Synthetic
gaacagauuuugaacaguu

SEQ ID NO: 6177 - RNA, 19 nt, Artificial Sequence
  Synthetic
acagacagaugcugaacua

SEQ ID NO: 6178 - RNA, 19 nt, Artificial Sequence
  Synthetic
gaaaggacugcuucagaaa

SEQ ID NO: 6179 - RNA, 19 nt, Artificial Sequence
  Synthetic
gagccaaccugcagaaugu

SEQ ID NO: 6180 - RNA, 19 nt, Artificial Sequence
  Synthetic
ugacaacuaugaaggguuu

SEQ ID NO: 6181 - RNA, 19 nt, Artificial Sequence
  Synthetic
gauuuaaggacguucuuua

SEQ ID NO: 6182 - RNA, 19 nt, Artificial Sequence
  Synthetic
agaaagcuauggagugauu

SEQ ID NO: 6183 - RNA, 19 nt, Artificial Sequence
  Synthetic
gaacucaacuaggguguua

SEQ ID NO: 6184 - RNA, 19 nt, Artificial Sequence
  Synthetic
gcacucugcuggaugaaau

SEQ ID NO: 6185 - RNA, 19 nt, Artificial Sequence
  Synthetic
gagcugaucgcuuuaaaua

SEQ ID NO: 6186 - RNA, 19 nt, Artificial Sequence
  Synthetic
gauaccaacuagagauaaa

SEQ ID NO: 6187 - RNA, 19 nt, Artificial Sequence
  Synthetic
gcaaaucaguacaaacaaa

SEQ ID NO: 6188 - RNA, 19 nt, Artificial Sequence
  Synthetic
auagagagcugcugauaua

SEQ ID NO: 6189 - RNA, 19 nt, Artificial Sequence
  Synthetic
ugauaggaaugcaguaaua

SEQ ID NO: 6190 - RNA, 19 nt, Artificial Sequence
  Synthetic
aaucauaacgucagcauaa

SEQ ID NO: 6191 - RNA, 19 nt, Artificial Sequence
  Synthetic
ggaauagaaguguguuaua

SEQ ID NO: 6192 - RNA, 19 nt, Artificial Sequence
  Synthetic
aauugaagauggugaccua

SEQ ID NO: 6193 - RNA, 19 nt, Artificial Sequence
  Synthetic
gaagaaacaugcuacuuua

SEQ ID NO: 6194 - RNA, 19 nt, Artificial Sequence
  Synthetic
gaaucaagcgggaguucaa

SEQ ID NO: 6195 - RNA, 19 nt, Artificial Sequence
  Synthetic
ucagaugcacauaggaaua

SEQ ID NO: 6196 - RNA, 19 nt, Artificial Sequence
  Synthetic
ccagaaacauacccauuua

SEQ ID NO: 6197 - RNA, 19 nt, Artificial Sequence
  Synthetic
gcacauaggaauagaagug

SEQ ID NO: 6198 - RNA, 19 nt, Artificial Sequence
  Synthetic
gagauugcuuuauuggaua

SEQ ID NO: 6199 - RNA, 19 nt, Artificial Sequence
  Synthetic
ccucugugccugugaauuu

SEQ ID NO: 6200 - RNA, 19 nt, Artificial Sequence
  Synthetic
gcaggcaguucuauauaua

SEQ ID NO: 6201 - RNA, 19 nt, Artificial Sequence
  Synthetic
agaguuugcuucaggauuu

SEQ ID NO: 6202 - RNA, 19 nt, Artificial Sequence
  Synthetic
ggaagaaacaugcuacuuu

SEQ ID NO: 6203 - RNA, 19 nt, Artificial Sequence
  Synthetic
aaguaaggcuguauauuga

SEQ ID NO: 6204 - RNA, 19 nt, Artificial Sequence
  Synthetic
ccugaaagaucaaugggca

SEQ ID NO: 6205 - RNA, 19 nt, Artificial Sequence
  Synthetic
uagcaaaucaguacaaaca

SEQ ID NO: 6206 - RNA, 19 nt, Artificial Sequence
  Synthetic
ugaaggaggaagauaccaa

SEQ ID NO: 6207 - RNA, 19 nt, Artificial Sequence
  Synthetic
aagauaccaacuagagaua

SEQ ID NO: 6208 - RNA, 19 nt, Artificial Sequence
  Synthetic
gcacgguauuauugucauu

SEQ ID NO: 6209 - RNA, 19 nt, Artificial Sequence
  Synthetic
ggauguagagacugcaaca

SEQ ID NO: 6210 - RNA, 19 nt, Artificial Sequence
  Synthetic
guuuggauauccugaaaga

SEQ ID NO: 6211 - RNA, 19 nt, Artificial Sequence
  Synthetic
aggaggugcugaagagcga

SEQ ID NO: 6212 - RNA, 19 nt, Artificial Sequence
  Synthetic
gaauuaaaguaaggcugua

SEQ ID NO: 6213 - RNA, 19 nt, Artificial Sequence
  Synthetic
gguaaauuucucuguauca

SEQ ID NO: 6214 - RNA, 19 nt, Artificial Sequence
  Synthetic
gcugaaggacaguauguau

SEQ ID NO: 6215 - RNA, 19 nt, Artificial Sequence
  Synthetic
gggcuauuuguuuggauau

SEQ ID NO: 6216 - RNA, 19 nt, Artificial Sequence
  Synthetic
ggacauuacaggaggccaa

SEQ ID NO: 6217 - RNA, 19 nt, Artificial Sequence
  Synthetic
ggagagugauggagaguac

SEQ ID NO: 6218 - RNA, 19 nt, Artificial Sequence
  Synthetic
gaaggaaucaacacagaaa

SEQ ID NO: 6219 - RNA, 19 nt, Artificial Sequence
  Synthetic
ccagcgaggaagugaacaa

SEQ ID NO: 6220 - RNA, 19 nt, Artificial Sequence
  Synthetic
cagcgaacccagcgaggaa

SEQ ID NO: 6221 - RNA, 19 nt, Artificial Sequence
  Synthetic
cugcaggcaugcugaacaa

SEQ ID NO: 6222 - RNA, 19 nt, Artificial Sequence
  Synthetic
caugagggcaggagaguga

SEQ ID NO: 6223 - RNA, 19 nt, Artificial Sequence
  Synthetic
ccagagggauggagagaug

SEQ ID NO: 6224 - RNA, 19 nt, Artificial Sequence
  Synthetic
ccgagacccaggagacaaa

SEQ ID NO: 6225 - RNA, 19 nt, Artificial Sequence
  Synthetic
cugaagaagacauggcuca

SEQ ID NO: 6226 - RNA, 19 nt, Artificial Sequence
  Synthetic
agaacggcaucgugagaca

SEQ ID NO: 6227 - RNA, 19 nt, Artificial Sequence
  Synthetic
caacauucugggagggcuu

SEQ ID NO: 6228 - RNA, 19 nt, Artificial Sequence
  Synthetic
cauuacaggaggccaaaua

SEQ ID NO: 6229 - RNA, 19 nt, Artificial Sequence
  Synthetic
ggaacaaggauguggacuc

SEQ ID NO: 6230 - RNA, 19 nt, Artificial Sequence
  Synthetic
cagaaggaaucaacacaga

SEQ ID NO: 6231 - RNA, 19 nt, Artificial Sequence
  Synthetic
ccaacauccuggacagcau

SEQ ID NO: 6232 - RNA, 19 nt, Artificial Sequence
  Synthetic
ggaccaagagcaucaaaga

SEQ ID NO: 6233 - RNA, 19 nt, Artificial Sequence
  Synthetic
acacaucgauagggaacaa

SEQ ID NO: 6234 - RNA, 19 nt, Artificial Sequence
  Synthetic
cgauagggaacaaggaugu

SEQ ID NO: 6235 - RNA, 19 nt, Artificial Sequence
  Synthetic
acggaagauccaggagaaa

SEQ ID NO: 6236 - RNA, 19 nt, Artificial Sequence
  Synthetic
ggacacaucgauagggaac

SEQ ID NO: 6237 - RNA, 19 nt, Artificial Sequence
  Synthetic
gcuugggccaugagcgaau

SEQ ID NO: 6238 - RNA, 19 nt, Artificial Sequence
  Synthetic
aacggaagauccaggagaa

SEQ ID NO: 6239 - RNA, 19 nt, Artificial Sequence
  Synthetic
acaccaagcugaagaagac

SEQ ID NO: 6240 - RNA, 19 nt, Artificial Sequence
  Synthetic
gaacggaagauccaggaga

SEQ ID NO: 6241 - RNA, 19 nt, Artificial Sequence
  Synthetic
gcaagggcuuuuacuacaa

SEQ ID NO: 6242 - RNA, 19 nt, Artificial Sequence
  Synthetic
uggaaggaggccaugcuua

SEQ ID NO: 6243 - RNA, 19 nt, Artificial Sequence
  Synthetic
ccuucaugauuuccauuaa

SEQ ID NO: 6244 - RNA, 19 nt, Artificial Sequence
  Synthetic
ccagcaggguggagaaccu

SEQ ID NO: 6245 - RNA, 19 nt, Artificial Sequence
  Synthetic
gcagcaagggcuuuuacua

SEQ ID NO: 6246 - RNA, 19 nt, Artificial Sequence
  Synthetic
ggaagaugaugaaggagaa

SEQ ID NO: 6247 - RNA, 19 nt, Artificial Sequence
  Synthetic
gcaccaaggccaugaagaa

SEQ ID NO: 6248 - RNA, 19 nt, Artificial Sequence
  Synthetic
aggaagaagaggaagacaa

SEQ ID NO: 6249 - RNA, 19 nt, Artificial Sequence
  Synthetic
gggaagaugaugaaggaga

SEQ ID NO: 6250 - RNA, 19 nt, Artificial Sequence
  Synthetic
gagaagaggaggaggagga

SEQ ID NO: 6251 - RNA, 19 nt, Artificial Sequence
  Synthetic
gcagcaaggaccagaggaa

SEQ ID NO: 6252 - RNA, 19 nt, Artificial Sequence
  Synthetic
gcaccaaggccacgggauu

SEQ ID NO: 6253 - RNA, 19 nt, Artificial Sequence
  Synthetic
gcaccgaagccaugaagaa

SEQ ID NO: 6254 - RNA, 19 nt, Artificial Sequence
  Synthetic
gugaagaggaugaggaugu

SEQ ID NO: 6255 - RNA, 19 nt, Artificial Sequence
  Synthetic
aggaagagguugaggcugu

SEQ ID NO: 6256 - RNA, 19 nt, Artificial Sequence
  Synthetic
acagaaaggaagagguuga

SEQ ID NO: 6257 - RNA, 19 nt, Artificial Sequence
  Synthetic
aggaagaugaggaggauga

SEQ ID NO: 6258 - RNA, 19 nt, Artificial Sequence
  Synthetic
agaggaagguggacagaga

SEQ ID NO: 6259 - RNA, 19 nt, Artificial Sequence
  Synthetic
aggaggaggaggaggaaga

SEQ ID NO: 6260 - RNA, 19 nt, Artificial Sequence
  Synthetic
ccaccaagaugaagaaacu

SEQ ID NO: 6261 - RNA, 19 nt, Artificial Sequence
  Synthetic
aggaagaggaggaggagga

SEQ ID NO: 6262 - RNA, 19 nt, Artificial Sequence
  Synthetic
aggaagaagaugaggaugu

SEQ ID NO: 6263 - RNA, 19 nt, Artificial Sequence
  Synthetic
ggauugaagaggaugaaga

SEQ ID NO: 6264 - RNA, 19 nt, Artificial Sequence
  Synthetic
ggucaaggauagaagccau

SEQ ID NO: 6265 - RNA, 19 nt, Artificial Sequence
  Synthetic
aggaaaaggagaaggaaga

SEQ ID NO: 6266 - RNA, 19 nt, Artificial Sequence
  Synthetic
ccacagaaaggaagagguu

SEQ ID NO: 6267 - RNA, 19 nt, Artificial Sequence
  Synthetic
ggaggaggaagaagaggaa

SEQ ID NO: 6268 - RNA, 19 nt, Artificial Sequence
  Synthetic
gaagaugucuccaaggaau

SEQ ID NO: 6269 - RNA, 19 nt, Artificial Sequence
  Synthetic
uagaugaggaagaggaaga

SEQ ID NO: 6270 - RNA, 19 nt, Artificial Sequence
  Synthetic
gcgaggaggaagaggagga

SEQ ID NO: 6271 - RNA, 19 nt, Artificial Sequence
  Synthetic
gugaaaaggaggaugaaga

SEQ ID NO: 6272 - RNA, 19 nt, Artificial Sequence
  Synthetic
ccaugaagaagaugacaau

SEQ ID NO: 6273 - RNA, 19 nt, Artificial Sequence
  Synthetic
ggauguuuccacagagaau

SEQ ID NO: 6274 - RNA, 19 nt, Artificial Sequence
  Synthetic
gagacgaggaagaagauga

SEQ ID NO: 6275 - RNA, 19 nt, Artificial Sequence
  Synthetic
ccaugaaggcagaagguuu

SEQ ID NO: 6276 - RNA, 19 nt, Artificial Sequence
  Synthetic
cagaggagcuccaggcaau

SEQ ID NO: 6277 - RNA, 19 nt, Artificial Sequence
  Synthetic
caugaaggcagaagguuua

SEQ ID NO: 6278 - RNA, 19 nt, Artificial Sequence
  Synthetic
ugggcaaggugaugggcaa

SEQ ID NO: 6279 - RNA, 19 nt, Artificial Sequence
  Synthetic
ccgccaugcugcagaucaa

SEQ ID NO: 6280 - RNA, 19 nt, Artificial Sequence
  Synthetic
gcacagaggagaugccuga

SEQ ID NO: 6281 - RNA, 19 nt, Artificial Sequence
  Synthetic
agacaguuucagaugauua

SEQ ID NO: 6282 - RNA, 19 nt, Artificial Sequence
  Synthetic
ggagacaguuucagaugau

SEQ ID NO: 6283 - RNA, 19 nt, Artificial Sequence
  Synthetic
acaacaaggcuguguacau

SEQ ID NO: 6284 - RNA, 19 nt, Artificial Sequence
  Synthetic
cagcagagauggagcaccu

SEQ ID NO: 6285 - RNA, 19 nt, Artificial Sequence
  Synthetic
gguguuuggcuuugaguau

SEQ ID NO: 6286 - RNA, 19 nt, Artificial Sequence
  Synthetic
acuagugucuuuuggcuua

SEQ ID NO: 6287 - RNA, 19 nt, Artificial Sequence
  Synthetic
ucaucaagguucugcugua

SEQ ID NO: 6288 - RNA, 19 nt, Artificial Sequence
  Synthetic
cugcagugccgaacaguau

SEQ ID NO: 6289 - RNA, 19 nt, Artificial Sequence
  Synthetic
guucaagaaagcugugaca

SEQ ID NO: 6290 - RNA, 19 nt, Artificial Sequence
  Synthetic
caugagacaguucaagaaa

SEQ ID NO: 6291 - RNA, 19 nt, Artificial Sequence
  Synthetic
ccaugagacaguucaagaa

SEQ ID NO: 6292 - RNA, 19 nt, Artificial Sequence
  Synthetic
gagaagagauggugacugg

SEQ ID NO: 6293 - RNA, 19 nt, Artificial Sequence
  Synthetic
ccagaggagcuccaggcaa

SEQ ID NO: 6294 - RNA, 19 nt, Artificial Sequence
  Synthetic
ccaagagacugcccugcaa

SEQ ID NO: 6295 - RNA, 19 nt, Artificial Sequence
  Synthetic
gaacauguccugccaccaa

SEQ ID NO: 6296 - RNA, 19 nt, Artificial Sequence
  Synthetic
ggaggcaagcuaugaacuu

SEQ ID NO: 6297 - RNA, 19 nt, Artificial Sequence
  Synthetic
ccaucaugaucaaggugca

SEQ ID NO: 6298 - RNA, 19 nt, Artificial Sequence
  Synthetic
caagguguucuuugggcaa

SEQ ID NO: 6299 - RNA, 19 nt, Artificial Sequence
  Synthetic
cuuccuuacuagugucuuu

SEQ ID NO: 6300 - RNA, 19 nt, Artificial Sequence
  Synthetic
gggacaacaaggcugugua

SEQ ID NO: 6301 - RNA, 19 nt, Artificial Sequence
  Synthetic
ccacacaacucagggaaag

SEQ ID NO: 6302 - RNA, 19 nt, Artificial Sequence
  Synthetic
gcauggcaguccuguacau

SEQ ID NO: 6303 - RNA, 19 nt, Artificial Sequence
  Synthetic
gccuccagcuccugaguca

SEQ ID NO: 6304 - RNA, 19 nt, Artificial Sequence
  Synthetic
ccuaagacugguacccauu

SEQ ID NO: 6305 - RNA, 19 nt, Artificial Sequence
  Synthetic
ggacauaaagaaagggaau

SEQ ID NO: 6306 - RNA, 19 nt, Artificial Sequence
  Synthetic
augcugagguugagauaaa

SEQ ID NO: 6307 - RNA, 19 nt, Artificial Sequence
  Synthetic
agagaaacuuggagcugaa

SEQ ID NO: 6308 - RNA, 19 nt, Artificial Sequence
  Synthetic
cagucgaacucgugaauga

SEQ ID NO: 6309 - RNA, 19 nt, Artificial Sequence
  Synthetic
gagauaaagacgggacaua

SEQ ID NO: 6310 - RNA, 19 nt, Artificial Sequence
  Synthetic
ggauggugaucauugguaa

SEQ ID NO: 6311 - RNA, 19 nt, Artificial Sequence
  Synthetic
ccaaaggaugaaacaaaua

SEQ ID NO: 6312 - RNA, 19 nt, Artificial Sequence
  Synthetic
cuagaaaggguuagcauuu

SEQ ID NO: 6313 - RNA, 19 nt, Artificial Sequence
  Synthetic
uaccaaaggaugaaacaaa

SEQ ID NO: 6314 - RNA, 19 nt, Artificial Sequence
  Synthetic
gcaacaucacggagucaua

SEQ ID NO: 6315 - RNA, 19 nt, Artificial Sequence
  Synthetic
acacagaagacuuagauca

SEQ ID NO: 6316 - RNA, 19 nt, Artificial Sequence
  Synthetic
gcauggaacuucucaccaa

SEQ ID NO: 6317 - RNA, 19 nt, Artificial Sequence
  Synthetic
agauaaagacgggacauaa

SEQ ID NO: 6318 - RNA, 19 nt, Artificial Sequence
  Synthetic
cugaaacgaugguguuaau

SEQ ID NO: 6319 - RNA, 19 nt, Artificial Sequence
  Synthetic
caacaaaucucaauacagu

SEQ ID NO: 6320 - RNA, 19 nt, Artificial Sequence
  Synthetic
agaaaggguuagcauuuua

SEQ ID NO: 6321 - RNA, 19 nt, Artificial Sequence
  Synthetic
gggaaauuauggauucuuu

SEQ ID NO: 6322 - RNA, 19 nt, Artificial Sequence
  Synthetic
ccaaagauggccaagugaa

SEQ ID NO: 6323 - RNA, 19 nt, Artificial Sequence
  Synthetic
ggaauaggaugguaauaua

SEQ ID NO: 6324 - RNA, 19 nt, Artificial Sequence
  Synthetic
gcaauaggguguagcguuu

SEQ ID NO: 6325 - RNA, 19 nt, Artificial Sequence
  Synthetic
gcagaagaauagagcauuu

SEQ ID NO: 6326 - RNA, 19 nt, Artificial Sequence
  Synthetic
gcaaaguguuuaagcaaga

SEQ ID NO: 6327 - RNA, 19 nt, Artificial Sequence
  Synthetic
gagcaaaguguuuaagcaa

SEQ ID NO: 6328 - RNA, 19 nt, Artificial Sequence
  Synthetic
cuuaaugggccaagcaaua

SEQ ID NO: 6329 - RNA, 19 nt, Artificial Sequence
  Synthetic
gaucgaagcaauugaagua

SEQ ID NO: 6330 - RNA, 19 nt, Artificial Sequence
  Synthetic
agauggagcuucuggguau

SEQ ID NO: 6331 - RNA, 19 nt, Artificial Sequence
  Synthetic
guacagaaguuaccaauuu

SEQ ID NO: 6332 - RNA, 19 nt, Artificial Sequence
  Synthetic
aaacaaagugcaugaugaa

SEQ ID NO: 6333 - RNA, 19 nt, Artificial Sequence
  Synthetic
ggaccauggaggcagaaua

SEQ ID NO: 6334 - RNA, 19 nt, Artificial Sequence
  Synthetic
cauaaagcaugcuggugua

SEQ ID NO: 6335 - RNA, 19 nt, Artificial Sequence
  Synthetic
ucaagaagcacuauagauu

SEQ ID NO: 6336 - RNA, 19 nt, Artificial Sequence
  Synthetic
uaaaggaauaggaugguaa

SEQ ID NO: 6337 - RNA, 19 nt, Artificial Sequence
  Synthetic
agaggaugaugaagaggaa

SEQ ID NO: 6338 - RNA, 19 nt, Artificial Sequence
  Synthetic
gcacuauagauuuagcuaa

SEQ ID NO: 6339 - RNA, 19 nt, Artificial Sequence
  Synthetic
ggcagaaaggauucagaua

SEQ ID NO: 6340 - RNA, 19 nt, Artificial Sequence
  Synthetic
uguaaugccucaauggaau

SEQ ID NO: 6341 - RNA, 19 nt, Artificial Sequence
  Synthetic
caacacaccuuaugagaaa

SEQ ID NO: 6342 - RNA, 19 nt, Artificial Sequence
  Synthetic
aggaagagaugcuugauaa

SEQ ID NO: 6343 - RNA, 19 nt, Artificial Sequence
  Synthetic
ugacauauccucagaauuu

SEQ ID NO: 6344 - RNA, 19 nt, Artificial Sequence
  Synthetic
acaaaaggcugaugaggaa

SEQ ID NO: 6345 - RNA, 19 nt, Artificial Sequence
  Synthetic
gaagcaugcaagacagaaa

SEQ ID NO: 6346 - RNA, 19 nt, Artificial Sequence
  Synthetic
ggaagagaugcuugauaau

SEQ ID NO: 6347 - RNA, 19 nt, Artificial Sequence
  Synthetic
caugcaagacagaaacaaa

SEQ ID NO: 6348 - RNA, 19 nt, Artificial Sequence
  Synthetic
auaaagaccaaauggauga

SEQ ID NO: 6349 - RNA, 19 nt, Artificial Sequence
  Synthetic
guacacaacucaacacaga

SEQ ID NO: 6350 - RNA, 19 nt, Artificial Sequence
  Synthetic
ccugcgagcucaaauauua

SEQ ID NO: 6351 - RNA, 19 nt, Artificial Sequence
  Synthetic
agauaaagaccaaauggau

SEQ ID NO: 6352 - RNA, 19 nt, Artificial Sequence
  Synthetic
cagagaagcaugcaagaca

SEQ ID NO: 6353 - RNA, 19 nt, Artificial Sequence
  Synthetic
gaggaagagaugcuugaua

SEQ ID NO: 6354 - RNA, 19 nt, Artificial Sequence
  Synthetic
aaggaaggccagucagcua

SEQ ID NO: 6355 - RNA, 19 nt, Artificial Sequence
  Synthetic
acacaacucaacacagaaa

SEQ ID NO: 6356 - RNA, 19 nt, Artificial Sequence
  Synthetic
agagagagcugcacauguu

SEQ ID NO: 6357 - RNA, 19 nt, Artificial Sequence
  Synthetic
aggcaucacauguuggcaa

SEQ ID NO: 6358 - RNA, 19 nt, Artificial Sequence
  Synthetic
cagucagcuaguaggcaua

SEQ ID NO: 6359 - RNA, 19 nt, Artificial Sequence
  Synthetic
ucacauguuggcaagauaa

SEQ ID NO: 6360 - RNA, 19 nt, Artificial Sequence
  Synthetic
ugauucugcuggaaggauu

SEQ ID NO: 6361 - RNA, 19 nt, Artificial Sequence
  Synthetic
ggcaagauaaagaccaaau

SEQ ID NO: 6362 - RNA, 19 nt, Artificial Sequence
  Synthetic
aauauuagguggagccaac

SEQ ID NO: 6363 - RNA, 19 nt, Artificial Sequence
  Synthetic
gauaaagaccaaauggaug

SEQ ID NO: 6364 - RNA, 19 nt, Artificial Sequence
  Synthetic
ccagucagcuaguaggcau

SEQ ID NO: 6365 - RNA, 19 nt, Artificial Sequence
  Synthetic
cauguuagccacagagcca

SEQ ID NO: 6366 - RNA, 19 nt, Artificial Sequence
  Synthetic
gccagacaguggacagaga

SEQ ID NO: 6367 - RNA, 19 nt, Artificial Sequence
  Synthetic
cagcuaguaggcauagaaa

SEQ ID NO: 6368 - RNA, 19 nt, Artificial Sequence
  Synthetic
ccaacacaccuuaugagaa

SEQ ID NO: 6369 - RNA, 19 nt, Artificial Sequence
  Synthetic
uuaucauuccugagaggua

SEQ ID NO: 6370 - RNA, 19 nt, Artificial Sequence
  Synthetic
gagaagcaugcaagacaga

SEQ ID NO: 6371 - RNA, 19 nt, Artificial Sequence
  Synthetic
cugaugugguggagagauu

SEQ ID NO: 6372 - RNA, 19 nt, Artificial Sequence
  Synthetic
ccggagaggauaugaggaa

SEQ ID NO: 6373 - RNA, 19 nt, Artificial Sequence
  Synthetic
ggagaggauaugaggaaga

SEQ ID NO: 6374 - RNA, 19 nt, Artificial Sequence
  Synthetic
gcccauugcaggaguauua

SEQ ID NO: 6375 - RNA, 19 nt, Artificial Sequence
  Synthetic
aggaagacauggagacgau

SEQ ID NO: 6376 - RNA, 19 nt, Artificial Sequence
  Synthetic
gaggauaugaggaagacau

SEQ ID NO: 6377 - RNA, 19 nt, Artificial Sequence
  Synthetic
ccacugagguuucuccuaa

SEQ ID NO: 6378 - RNA, 19 nt, Artificial Sequence
  Synthetic
ucucaguggugguauggaa

SEQ ID NO: 6379 - RNA, 19 nt, Artificial Sequence
  Synthetic
aggcucugcuggucaaaua

SEQ ID NO: 6380 - RNA, 19 nt, Artificial Sequence
  Synthetic
gcaggaguauuaauagcaa

SEQ ID NO: 6381 - RNA, 19 nt, Artificial Sequence
  Synthetic
gugcaucuguggcaauaaa

SEQ ID NO: 6382 - RNA, 19 nt, Artificial Sequence
  Synthetic
agacugagacucugguuga

SEQ ID NO: 6383 - RNA, 19 nt, Artificial Sequence
  Synthetic
gcucaaaaccaaauccauu

SEQ ID NO: 6384 - RNA, 19 nt, Artificial Sequence
  Synthetic
gaagacauggagacgauuu

SEQ ID NO: 6385 - RNA, 19 nt, Artificial Sequence
  Synthetic
acgcaaggccugguguuua

SEQ ID NO: 6386 - RNA, 19 nt, Artificial Sequence
  Synthetic
gauaugaggaagacaugga

SEQ ID NO: 6387 - RNA, 19 nt, Artificial Sequence
  Synthetic
ugaccaugauuccuacaua

SEQ ID NO: 6388 - RNA, 19 nt, Artificial Sequence
  Synthetic
ugggaauacuucagacauc

SEQ ID NO: 6389 - RNA, 19 nt, Artificial Sequence
  Synthetic
gcucacucgaccugcuuua

SEQ ID NO: 6390 - RNA, 19 nt, Artificial Sequence
  Synthetic
gguuguaaucguugaggaa

SEQ ID NO: 6391 - RNA, 19 nt, Artificial Sequence
  Synthetic
uuguaaucguugaggaaau

SEQ ID NO: 6392 - RNA, 19 nt, Artificial Sequence
  Synthetic
gagauuagugcgaggguca

SEQ ID NO: 6393 - RNA, 19 nt, Artificial Sequence
  Synthetic
gagcaugggcagaggaaug

SEQ ID NO: 6394 - RNA, 19 nt, Artificial Sequence
  Synthetic
gaucagaaagcaaauacaa

SEQ ID NO: 6395 - RNA, 19 nt, Artificial Sequence
  Synthetic
acaucaaaccucaguauau

SEQ ID NO: 6396 - RNA, 19 nt, Artificial Sequence
  Synthetic
cuuuacaaccuucaagaaa

SEQ ID NO: 6397 - RNA, 19 nt, Artificial Sequence
  Synthetic
uuaccgauguggugagaga

SEQ ID NO: 6398 - RNA, 19 nt, Artificial Sequence
  Synthetic
gguguuaacugcaaggagu

SEQ ID NO: 6399 - RNA, 19 nt, Artificial Sequence
  Synthetic
ggguuuauaucgaacgcaa

SEQ ID NO: 6400 - RNA, 19 nt, Artificial Sequence
  Synthetic
gaacacaggugguggggau

SEQ ID NO: 6401 - RNA, 19 nt, Artificial Sequence
  Synthetic
ccgagaaggaugugggucu

SEQ ID NO: 6402 - RNA, 19 nt, Artificial Sequence
  Synthetic
gguacugccuucagaacuu

SEQ ID NO: 6403 - RNA, 19 nt, Artificial Sequence
  Synthetic
cgccaugacugcugaaaau

SEQ ID NO: 6404 - RNA, 19 nt, Artificial Sequence
  Synthetic
gugagcagucucuggacaa

SEQ ID NO: 6405 - RNA, 19 nt, Artificial Sequence
  Synthetic
gccuucagaacuuggauaa

SEQ ID NO: 6406 - RNA, 19 nt, Artificial Sequence
  Synthetic
aguacaugcagcuggcaau

SEQ ID NO: 6407 - RNA, 19 nt, Artificial Sequence
  Synthetic
caacggaaaaggagugaaa

SEQ ID NO: 6408 - RNA, 19 nt, Artificial Sequence
  Synthetic
gguuagaaguucaagccga

SEQ ID NO: 6409 - RNA, 19 nt, Artificial Sequence
  Synthetic
ccgcagugaccuagagagu

SEQ ID NO: 6410 - RNA, 19 nt, Artificial Sequence
  Synthetic
acggaaaaggagugaaaau

SEQ ID NO: 6411 - RNA, 19 nt, Artificial Sequence
  Synthetic
gcaauuagugacaacgcaa

SEQ ID NO: 6412 - RNA, 19 nt, Artificial Sequence
  Synthetic
cagguaugagggaaggaaa

SEQ ID NO: 6413 - RNA, 19 nt, Artificial Sequence
  Synthetic
agguaugagggaaggaaaa

SEQ ID NO: 6414 - RNA, 19 nt, Artificial Sequence
  Synthetic
cacaagaggaauuuggcua

SEQ ID NO: 6415 - RNA, 19 nt, Artificial Sequence
  Synthetic
guuagaaguucaagccgau

SEQ ID NO: 6416 - RNA, 19 nt, Artificial Sequence
  Synthetic
gauacgaguucgagcugaa

SEQ ID NO: 6417 - RNA, 19 nt, Artificial Sequence
  Synthetic
cuggagacaucaaaguuaa

SEQ ID NO: 6418 - RNA, 19 nt, Artificial Sequence
  Synthetic
gcuggagacaucaaaguua

SEQ ID NO: 6419 - RNA, 19 nt, Artificial Sequence
  Synthetic
gagaaagagaagcagcaga

SEQ ID NO: 6420 - RNA, 19 nt, Artificial Sequence
  Synthetic
gagaagcagcagaggaaug

SEQ ID NO: 6421 - RNA, 19 nt, Artificial Sequence
  Synthetic
ccggcauggaucaggagaa

SEQ ID NO: 6422 - RNA, 19 nt, Artificial Sequence
  Synthetic
ccaaagcagugcgggaaca

SEQ ID NO: 6423 - RNA, 19 nt, Artificial Sequence
  Synthetic
ccaccauccuugcuggaga

SEQ ID NO: 6424 - RNA, 19 nt, Artificial Sequence
  Synthetic
cggcgaagcagaagucagu

SEQ ID NO: 6425 - RNA, 19 nt, Artificial Sequence
  Synthetic
gagacaucaaaguuaagaa

SEQ ID NO: 6426 - RNA, 19 nt, Artificial Sequence
  Synthetic
gggaacagcuacuggcgcu

SEQ ID NO: 6427 - RNA, 19 nt, Artificial Sequence
  Synthetic
ggccaggaccgcuaugaca

SEQ ID NO: 6428 - RNA, 19 nt, Artificial Sequence
  Synthetic
ccaaagauguguauaguua

SEQ ID NO: 6429 - RNA, 19 nt, Artificial Sequence
  Synthetic
gggaaaaccuacuguaaaa

SEQ ID NO: 6430 - RNA, 19 nt, Artificial Sequence
  Synthetic
ccacaagcgucucgggauu

SEQ ID NO: 6431 - RNA, 19 nt, Artificial Sequence
  Synthetic
caguggaaguacaaaguua

SEQ ID NO: 6432 - RNA, 19 nt, Artificial Sequence
  Synthetic
caguauauucugaggguuu

SEQ ID NO: 6433 - RNA, 19 nt, Artificial Sequence
  Synthetic
ugaaaugugcggaguguaa

SEQ ID NO: 6434 - RNA, 19 nt, Artificial Sequence
  Synthetic
ggagaaagugggaaauuau

SEQ ID NO: 6435 - RNA, 19 nt, Artificial Sequence
  Synthetic
cgccauauguagaauuaua

SEQ ID NO: 6436 - RNA, 19 nt, Artificial Sequence
  Synthetic
ggacugugcugaacgagaa

SEQ ID NO: 6437 - RNA, 19 nt, Artificial Sequence
  Synthetic
gaucuuagaaguacugaaa

SEQ ID NO: 6438 - RNA, 19 nt, Artificial Sequence
  Synthetic
gggaaauuauaaugucgaa

SEQ ID NO: 6439 - RNA, 19 nt, Artificial Sequence
  Synthetic
uggagaaagugggaaauua

SEQ ID NO: 6440 - RNA, 19 nt, Artificial Sequence
  Synthetic
gacaagaagcgaagcauca

SEQ ID NO: 6441 - RNA, 19 nt, Artificial Sequence
  Synthetic
aaugaaugcuccaugaaau

SEQ ID NO: 6442 - RNA, 19 nt, Artificial Sequence
  Synthetic
gcaacacugugaagacaau

SEQ ID NO: 6443 - RNA, 19 nt, Artificial Sequence
  Synthetic
gcuccaagguguaucacau

SEQ ID NO: 6444 - RNA, 19 nt, Artificial Sequence
  Synthetic
gagacacgacgguggcuua

SEQ ID NO: 6445 - RNA, 19 nt, Artificial Sequence
  Synthetic
cuuuguuagggaugggaaa

SEQ ID NO: 6446 - RNA, 19 nt, Artificial Sequence
  Synthetic
gcagcagcccaaugacaaa

SEQ ID NO: 6447 - RNA, 19 nt, Artificial Sequence
  Synthetic
guacgguggucuuugaauu

SEQ ID NO: 6448 - RNA, 19 nt, Artificial Sequence
  Synthetic
gaauggugcuguuucuaua

SEQ ID NO: 6449 - RNA, 19 nt, Artificial Sequence
  Synthetic
gagaaagugggaaauuaua

SEQ ID NO: 6450 - RNA, 19 nt, Artificial Sequence
  Synthetic
aggcuaacccaguggaagu

SEQ ID NO: 6451 - RNA, 19 nt, Artificial Sequence
  Synthetic
auucaaggaucucaaagaa

SEQ ID NO: 6452 - RNA, 19 nt, Artificial Sequence
  Synthetic
cuuggaaaguacugagcga

SEQ ID NO: 6453 - RNA, 19 nt, Artificial Sequence
  Synthetic
ugaaggagcaacugguaga

SEQ ID NO: 6454 - RNA, 19 nt, Artificial Sequence
  Synthetic
uuuguuugcugaagugaaa

SEQ ID NO: 6455 - RNA, 19 nt, Artificial Sequence
  Synthetic
aaucaaagcgccauaugua

SEQ ID NO: 6456 - RNA, 19 nt, Artificial Sequence
  Synthetic
cuucaggacuauuucacua

SEQ ID NO: 6457 - RNA, 19 nt, Artificial Sequence
  Synthetic
augacaaggugauauggua

SEQ ID NO: 6458 - RNA, 19 nt, Artificial Sequence
  Synthetic
cagcaaaacuuaaggaaaa

SEQ ID NO: 6459 - RNA, 19 nt, Artificial Sequence
  Synthetic
aagcaaagguucaguauuu

SEQ ID NO: 6460 - RNA, 19 nt, Artificial Sequence
  Synthetic
gagaagaagguuuagauua

SEQ ID NO: 6461 - RNA, 19 nt, Artificial Sequence
  Synthetic
gagcaauggaccacagaaa

SEQ ID NO: 6462 - RNA, 19 nt, Artificial Sequence
  Synthetic
gguaagaggcauuuguuaa

SEQ ID NO: 6463 - RNA, 19 nt, Artificial Sequence
  Synthetic
gaaacuacauguucagaaa

SEQ ID NO: 6464 - RNA, 19 nt, Artificial Sequence
  Synthetic
gauaaugagaagagaauga

SEQ ID NO: 6465 - RNA, 19 nt, Artificial Sequence
  Synthetic
cagucaaagaagacagaaa

SEQ ID NO: 6466 - RNA, 19 nt, Artificial Sequence
  Synthetic
agaagaaacagaaggauuu

SEQ ID NO: 6467 - RNA, 19 nt, Artificial Sequence
  Synthetic
caaauagaccgcagacaua

SEQ ID NO: 6468 - RNA, 19 nt, Artificial Sequence
  Synthetic
cagcaauggcagaguauau

SEQ ID NO: 6469 - RNA, 19 nt, Artificial Sequence
  Synthetic
gaaacaagagugagcacaa

SEQ ID NO: 6470 - RNA, 19 nt, Artificial Sequence
  Synthetic
ccucauagcucauguauca

SEQ ID NO: 6471 - RNA, 19 nt, Artificial Sequence
  Synthetic
agacaauggaccucagaua

SEQ ID NO: 6472 - RNA, 19 nt, Artificial Sequence
  Synthetic
gagcaaugcagcaguuuaa

SEQ ID NO: 6473 - RNA, 19 nt, Artificial Sequence
  Synthetic
auacaagagcuaugagcaa

SEQ ID NO: 6474 - RNA, 19 nt, Artificial Sequence
  Synthetic
cauaaagauuacagugaca

SEQ ID NO: 6475 - RNA, 19 nt, Artificial Sequence
  Synthetic
ggaaaacaauauugaggaa

SEQ ID NO: 6476 - RNA, 19 nt, Artificial Sequence
  Synthetic
gaauaugcagggaaggaua

SEQ ID NO: 6477 - RNA, 19 nt, Artificial Sequence
  Synthetic
uguagaucauguugagaaa

SEQ ID NO: 6478 - RNA, 19 nt, Artificial Sequence
  Synthetic
gcaaauagaccgcagacau

SEQ ID NO: 6479 - RNA, 19 nt, Artificial Sequence
  Synthetic
gcaauggaccacagaaauu

SEQ ID NO: 6480 - RNA, 19 nt, Artificial Sequence
  Synthetic
uagaagaaacagaaggauu

SEQ ID NO: 6481 - RNA, 19 nt, Artificial Sequence
  Synthetic
cgaagacguuuguggguga

SEQ ID NO: 6482 - RNA, 19 nt, Artificial Sequence
  Synthetic
gguaauauauggcuaauga

SEQ ID NO: 6483 - RNA, 19 nt, Artificial Sequence
  Synthetic
caacagagacaauaggaga

SEQ ID NO: 6484 - RNA, 19 nt, Artificial Sequence
  Synthetic
gcucauaccuguaauccua

SEQ ID NO: 6485 - RNA, 19 nt, Artificial Sequence
  Synthetic
ggugaaaauaggagaguca

SEQ ID NO: 6486 - RNA, 19 nt, Artificial Sequence
  Synthetic
gcaaggaccagcaaacaaa

SEQ ID NO: 6487 - RNA, 19 nt, Artificial Sequence
  Synthetic
uaggagagucagugggaau

SEQ ID NO: 6488 - RNA, 19 nt, Artificial Sequence
  Synthetic
cugaggaaguaguggauuu

SEQ ID NO: 6489 - RNA, 19 nt, Artificial Sequence
  Synthetic
ggaacugaccaaugaagaa

SEQ ID NO: 6490 - RNA, 19 nt, Artificial Sequence
  Synthetic
acuggaaguugaagaggaa

SEQ ID NO: 6491 - RNA, 19 nt, Artificial Sequence
  Synthetic
cgaauaugaugaagauguu

SEQ ID NO: 6492 - RNA, 19 nt, Artificial Sequence
  Synthetic
gcacagcucacauaggaaa

SEQ ID NO: 6493 - RNA, 19 nt, Artificial Sequence
  Synthetic
uggagaggguaaugauuga

SEQ ID NO: 6494 - RNA, 19 nt, Artificial Sequence
  Synthetic
gguugugucugaagagaaa

SEQ ID NO: 6495 - RNA, 19 nt, Artificial Sequence
  Synthetic
gggaaacacuggaccaaaa

SEQ ID NO: 6496 - RNA, 19 nt, Artificial Sequence
  Synthetic
agaaaaugcuuguggugua

SEQ ID NO: 6497 - RNA, 19 nt, Artificial Sequence
  Synthetic
ggguaaugauugacacuga

SEQ ID NO: 6498 - RNA, 19 nt, Artificial Sequence
  Synthetic
gcguagaagugaaagucuu

SEQ ID NO: 6499 - RNA, 19 nt, Artificial Sequence
  Synthetic
gaacaaugccaacgaugua

SEQ ID NO: 6500 - RNA, 19 nt, Artificial Sequence
  Synthetic
uguuagagauggcguagaa

SEQ ID NO: 6501 - RNA, 19 nt, Artificial Sequence
  Synthetic
gaucgaauaugaugaagau

SEQ ID NO: 6502 - RNA, 19 nt, Artificial Sequence
  Synthetic
ugccugaacuagaugaaua

SEQ ID NO: 6503 - RNA, 19 nt, Artificial Sequence
  Synthetic
cguagaagugaaagucuua

SEQ ID NO: 6504 - RNA, 19 nt, Artificial Sequence
  Synthetic
gcagugaggugcuaaguca

SEQ ID NO: 6505 - RNA, 19 nt, Artificial Sequence
  Synthetic
gaagaaggguggagcuaug

SEQ ID NO: 6506 - RNA, 19 nt, Artificial Sequence
  Synthetic
gaaaaugacccaaggaguu

SEQ ID NO: 6507 - RNA, 19 nt, Artificial Sequence
  Synthetic
ccacagacacuaaggacaa

SEQ ID NO: 6508 - RNA, 19 nt, Artificial Sequence
  Synthetic
acugaaacccuaaggauaa

SEQ ID NO: 6509 - RNA, 19 nt, Artificial Sequence
  Synthetic
gcaccaaauuagagagucu

SEQ ID NO: 6510 - RNA, 19 nt, Artificial Sequence
  Synthetic
ccauuaugauugaggauga

SEQ ID NO: 6511 - RNA, 19 nt, Artificial Sequence
  Synthetic
acacuaaggacaaggagua

SEQ ID NO: 6512 - RNA, 19 nt, Artificial Sequence
  Synthetic
aggaagacucugaggauga

SEQ ID NO: 6513 - RNA, 19 nt, Artificial Sequence
  Synthetic
ugaaaaggaagcagagaaa

SEQ ID NO: 6514 - RNA, 19 nt, Artificial Sequence
  Synthetic
cagagauggcagagaaaga

SEQ ID NO: 6515 - RNA, 19 nt, Artificial Sequence
  Synthetic
ucgaucugguggagggaaa

SEQ ID NO: 6516 - RNA, 19 nt, Artificial Sequence
  Synthetic
auuucaaguuagagagaga

SEQ ID NO: 6517 - RNA, 19 nt, Artificial Sequence
  Synthetic
gcccaagagucgaucuaaa

SEQ ID NO: 6518 - RNA, 19 nt, Artificial Sequence
  Synthetic
uggcagagaaagaagacua

SEQ ID NO: 6519 - RNA, 19 nt, Artificial Sequence
  Synthetic
aggagaaggacaaggaaua

SEQ ID NO: 6520 - RNA, 19 nt, Artificial Sequence
  Synthetic
gguaaauagcauugaggaa

SEQ ID NO: 6521 - RNA, 19 nt, Artificial Sequence
  Synthetic
aggaagagcuggaggagga

SEQ ID NO: 6522 - RNA, 19 nt, Artificial Sequence
  Synthetic
ucacagaggcugagcgaga

SEQ ID NO: 6523 - RNA, 19 nt, Artificial Sequence
  Synthetic
uggaacagguggaggccua

SEQ ID NO: 6524 - RNA, 19 nt, Artificial Sequence
  Synthetic
agaaggagaaggaggguau

SEQ ID NO: 6525 - RNA, 19 nt, Artificial Sequence
  Synthetic
agaccuuccuggagagcaa

SEQ ID NO: 6526 - RNA, 19 nt, Artificial Sequence
  Synthetic
gugucauggcggaguguaa

SEQ ID NO: 6527 - RNA, 19 nt, Artificial Sequence
  Synthetic
auaaugaggagaaggacaa

SEQ ID NO: 6528 - RNA, 19 nt, Artificial Sequence
  Synthetic
gauaaugaggagaaggaca

SEQ ID NO: 6529 - RNA, 19 nt, Artificial Sequence
  Synthetic
uggagaaggcagagcguca

SEQ ID NO: 6530 - RNA, 19 nt, Artificial Sequence
  Synthetic
agaagaauccagagcugaa

SEQ ID NO: 6531 - RNA, 19 nt, Artificial Sequence
  Synthetic
caacuauccaccaggcaaa

SEQ ID NO: 6532 - RNA, 19 nt, Artificial Sequence
  Synthetic
ggguagaaacguugagaau

SEQ ID NO: 6533 - RNA, 19 nt, Artificial Sequence
  Synthetic
uggcuaaggauaaggauaa

SEQ ID NO: 6534 - RNA, 19 nt, Artificial Sequence
  Synthetic
agccauaauucgugagaca

SEQ ID NO: 6535 - RNA, 19 nt, Artificial Sequence
  Synthetic
cguuugacaaugagguaaa

SEQ ID NO: 6536 - RNA, 19 nt, Artificial Sequence
  Synthetic
cugcuagccuggugggaau

SEQ ID NO: 6537 - RNA, 19 nt, Artificial Sequence
  Synthetic
caucaagggagucggacaa

SEQ ID NO: 6538 - RNA, 19 nt, Artificial Sequence
  Synthetic
guaucuuggcggaguguaa

SEQ ID NO: 6539 - RNA, 19 nt, Artificial Sequence
  Synthetic
gcaaaguggaggugggaac

SEQ ID NO: 6540 - RNA, 19 nt, Artificial Sequence
  Synthetic
gccaacagcuacaggccaa

SEQ ID NO: 6541 - RNA, 19 nt, Artificial Sequence
  Synthetic
cagcagagcauuuggagga

SEQ ID NO: 6542 - RNA, 19 nt, Artificial Sequence
  Synthetic
ucacggaggcugagcgaga

SEQ ID NO: 6543 - RNA, 19 nt, Artificial Sequence
  Synthetic
caugcaacuucgaaagaau

SEQ ID NO: 6544 - RNA, 19 nt, Artificial Sequence
  Synthetic
ggacauugcuuuucaaaua

SEQ ID NO: 6545 - RNA, 19 nt, Artificial Sequence
  Synthetic
ugaagaagcuggacacaaa

SEQ ID NO: 6546 - RNA, 19 nt, Artificial Sequence
  Synthetic
gaagaaagagagaggaaga

SEQ ID NO: 6547 - RNA, 19 nt, Artificial Sequence
  Synthetic
ggaagaaagaagaaagaga

SEQ ID NO: 6548 - RNA, 19 nt, Artificial Sequence
  Synthetic
ccauagaaguuguagguca

SEQ ID NO: 6549 - RNA, 19 nt, Artificial Sequence
  Synthetic
gccagaaguucgagaagaa

SEQ ID NO: 6550 - RNA, 19 nt, Artificial Sequence
  Synthetic
cauagaaguuguaggucaa

SEQ ID NO: 6551 - RNA, 19 nt, Artificial Sequence
  Synthetic
gcaagaaguucaaggagau

SEQ ID NO: 6552 - RNA, 19 nt, Artificial Sequence
  Synthetic
acacaaagcagcagaccaa

SEQ ID NO: 6553 - RNA, 19 nt, Artificial Sequence
  Synthetic
gaagaaaggcgaagguuga

SEQ ID NO: 6554 - RNA, 19 nt, Artificial Sequence
  Synthetic
ugaagaugcuuaugacaaa

SEQ ID NO: 6555 - RNA, 19 nt, Artificial Sequence
  Synthetic
aagaagaaagagagaggaa

SEQ ID NO: 6556 - RNA, 19 nt, Artificial Sequence
  Synthetic
acuaaaauucggugggaaa

SEQ ID NO: 6557 - RNA, 19 nt, Artificial Sequence
  Synthetic
cguuuuaacuguuggcgaa

SEQ ID NO: 6558 - RNA, 19 nt, Artificial Sequence
  Synthetic
gagaguagauguucaagaa

SEQ ID NO: 6559 - RNA, 19 nt, Artificial Sequence
  Synthetic
gcauacagauggaacagaa

SEQ ID NO: 6560 - RNA, 19 nt, Artificial Sequence
  Synthetic
ggaaauagcauaucugaga

SEQ ID NO: 6561 - RNA, 19 nt, Artificial Sequence
  Synthetic
ggucaaagacaaucaucaa

SEQ ID NO: 6562 - RNA, 19 nt, Artificial Sequence
  Synthetic
ugucagaacaagaagauau

SEQ ID NO: 6563 - RNA, 19 nt, Artificial Sequence
  Synthetic
gcaagaaauucagguauua

SEQ ID NO: 6564 - RNA, 19 nt, Artificial Sequence
  Synthetic
aguagauguucaagaaaga

SEQ ID NO: 6565 - RNA, 19 nt, Artificial Sequence
  Synthetic
ugagaaugcuugaaguauu

SEQ ID NO: 6566 - RNA, 19 nt, Artificial Sequence
  Synthetic
gagaaugcuugaaguauuu

SEQ ID NO: 6567 - RNA, 19 nt, Artificial Sequence
  Synthetic
aagaaagagugguggagca

SEQ ID NO: 6568 - RNA, 19 nt, Artificial Sequence
  Synthetic
aggaagggcugcuggugua

SEQ ID NO: 6569 - RNA, 19 nt, Artificial Sequence
  Synthetic
cauugaugguggugguauu

SEQ ID NO: 6570 - RNA, 19 nt, Artificial Sequence
  Synthetic
agcaagaaauucagguauu

SEQ ID NO: 6571 - RNA, 19 nt, Artificial Sequence
  Synthetic
cagaaguucgagaagaaua

SEQ ID NO: 6572 - RNA, 19 nt, Artificial Sequence
  Synthetic
cagcaauauuccauccaaa

SEQ ID NO: 6573 - RNA, 19 nt, Artificial Sequence
  Synthetic
aaagagaugaugaugguaa

SEQ ID NO: 6574 - RNA, 19 nt, Artificial Sequence
  Synthetic
acaagaagccauugagaaa

SEQ ID NO: 6575 - RNA, 19 nt, Artificial Sequence
  Synthetic
cagccaaaguggaagcaaa

SEQ ID NO: 6576 - RNA, 19 nt, Artificial Sequence
  Synthetic
aggaagaggaggagaauga

SEQ ID NO: 6577 - RNA, 19 nt, Artificial Sequence
  Synthetic
uggagaagcaggugaacaa

SEQ ID NO: 6578 - RNA, 19 nt, Artificial Sequence
  Synthetic
caagcagcaucaugagaaa

SEQ ID NO: 6579 - RNA, 19 nt, Artificial Sequence
  Synthetic
gaucuugggcuuugaggaa

SEQ ID NO: 6580 - RNA, 19 nt, Artificial Sequence
  Synthetic
gcccaaaggcagaaacaga

SEQ ID NO: 6581 - RNA, 19 nt, Artificial Sequence
  Synthetic
ccaccacuuuugagcauua

SEQ ID NO: 6582 - RNA, 19 nt, Artificial Sequence
  Synthetic
ggaccaggccucagacaga

SEQ ID NO: 6583 - RNA, 19 nt, Artificial Sequence
  Synthetic
gggagauucuggaugauga

SEQ ID NO: 6584 - RNA, 19 nt, Artificial Sequence
  Synthetic
cuagugaggacucgaguua

SEQ ID NO: 6585 - RNA, 19 nt, Artificial Sequence
  Synthetic
cucagaagaugcagccaaa

SEQ ID NO: 6586 - RNA, 19 nt, Artificial Sequence
  Synthetic
ugaagcagcugguggacuu

SEQ ID NO: 6587 - RNA, 19 nt, Artificial Sequence
  Synthetic
ccucaaaccuccaggcaua

SEQ ID NO: 6588 - RNA, 19 nt, Artificial Sequence
  Synthetic
gcacauuuccagaggacaa

SEQ ID NO: 6589 - RNA, 19 nt, Artificial Sequence
  Synthetic
caucaaagauaacggauuu

SEQ ID NO: 6590 - RNA, 19 nt, Artificial Sequence
  Synthetic
ggagaagacagaaggaaga

SEQ ID NO: 6591 - RNA, 19 nt, Artificial Sequence
  Synthetic
cauggagacuagagagaau

SEQ ID NO: 6592 - RNA, 19 nt, Artificial Sequence
  Synthetic
ggacaacagaggagacaga

SEQ ID NO: 6593 - RNA, 19 nt, Artificial Sequence
  Synthetic
uauaagugcuccugugaaa

SEQ ID NO: 6594 - RNA, 19 nt, Artificial Sequence
  Synthetic
aaagagaguucuaaaggua

SEQ ID NO: 6595 - RNA, 19 nt, Artificial Sequence
  Synthetic
ccaaacacucugacaguua

SEQ ID NO: 6596 - RNA, 19 nt, Artificial Sequence
  Synthetic
gggacgagagcaugacaaa

SEQ ID NO: 6597 - RNA, 19 nt, Artificial Sequence
  Synthetic
ccacaaugaucacagucaa

SEQ ID NO: 6598 - RNA, 19 nt, Artificial Sequence
  Synthetic
ccacaguguugcugcauca

SEQ ID NO: 6599 - RNA, 19 nt, Artificial Sequence
  Synthetic
gagcaaagugggcagaaca

SEQ ID NO: 6600 - RNA, 19 nt, Artificial Sequence
  Synthetic
gggaagcuuuggaguucaa

SEQ ID NO: 6601 - RNA, 19 nt, Artificial Sequence
  Synthetic
gauaacggauuugggauaa

SEQ ID NO: 6602 - RNA, 19 nt, Artificial Sequence
  Synthetic
ggacgaugguggccacaau

SEQ ID NO: 6603 - RNA, 19 nt, Artificial Sequence
  Synthetic
gagagaauggacuggaaga

SEQ ID NO: 6604 - RNA, 19 nt, Artificial Sequence
  Synthetic
gagaauggacuggaagaau

SEQ ID NO: 6605 - RNA, 19 nt, Artificial Sequence
  Synthetic
gaggaucccaucaaagaua

SEQ ID NO: 6606 - RNA, 19 nt, Artificial Sequence
  Synthetic
augcaaaggugauuagaaa

SEQ ID NO: 6607 - RNA, 19 nt, Artificial Sequence
  Synthetic
uagcauauguuaagaggaa

SEQ ID NO: 6608 - RNA, 19 nt, Artificial Sequence
  Synthetic
aagaggaauugcagugaaa

SEQ ID NO: 6609 - RNA, 19 nt, Artificial Sequence
  Synthetic
gaaccaugcuauugagaca

SEQ ID NO: 6610 - RNA, 19 nt, Artificial Sequence
  Synthetic
aaacagugcuucagccaaa

SEQ ID NO: 6611 - RNA, 19 nt, Artificial Sequence
  Synthetic
gcacagagguuaaguauuc

SEQ ID NO: 6612 - RNA, 19 nt, Artificial Sequence
  Synthetic
ccucaggagucacuagaaa

SEQ ID NO: 6613 - RNA, 19 nt, Artificial Sequence
  Synthetic
caaugaagaccuugcagaa

SEQ ID NO: 6614 - RNA, 19 nt, Artificial Sequence
  Synthetic
gaaggaugcuccaggauga

SEQ ID NO: 6615 - RNA, 19 nt, Artificial Sequence
  Synthetic
gugggaauauucagacaaa

SEQ ID NO: 6616 - RNA, 19 nt, Artificial Sequence
  Synthetic
gcagaaacuuggagaagcu

SEQ ID NO: 6617 - RNA, 19 nt, Artificial Sequence
  Synthetic
ggagcaagauggaagagaa

SEQ ID NO: 6618 - RNA, 19 nt, Artificial Sequence
  Synthetic
acuggaagcugaagaggaa

SEQ ID NO: 6619 - RNA, 19 nt, Artificial Sequence
  Synthetic
ggacuauauuagcagacaa

SEQ ID NO: 6620 - RNA, 19 nt, Artificial Sequence
  Synthetic
acgaugaggucaaguucaa

SEQ ID NO: 6621 - RNA, 19 nt, Artificial Sequence
  Synthetic
acucggagcuuaaggagau

SEQ ID NO: 6622 - RNA, 19 nt, Artificial Sequence
  Synthetic
ggaaaugcggacuauauua

SEQ ID NO: 6623 - RNA, 19 nt, Artificial Sequence
  Synthetic
ugacaaggcgcgagagaac

SEQ ID NO: 6624 - RNA, 19 nt, Artificial Sequence
  Synthetic
acggacgacuccagacaaa

SEQ ID NO: 6625 - RNA, 19 nt, Artificial Sequence
  Synthetic
caucgcaguuggaggcuau

SEQ ID NO: 6626 - RNA, 19 nt, Artificial Sequence
  Synthetic
ucaccaagaucucgcauau

SEQ ID NO: 6627 - RNA, 19 nt, Artificial Sequence
  Synthetic
gcuaugacuuggacgagau

SEQ ID NO: 6628 - RNA, 19 nt, Artificial Sequence
  Synthetic
gaaacuuauugaacaggau

SEQ ID NO: 6629 - RNA, 19 nt, Artificial Sequence
  Synthetic
ggaccaagugggugcaugu

SEQ ID NO: 6630 - RNA, 19 nt, Artificial Sequence
  Synthetic
gaauaaagacugaagaaga

SEQ ID NO: 6631 - RNA, 19 nt, Artificial Sequence
  Synthetic
uggaaugguucuaugaaua

SEQ ID NO: 6632 - RNA, 19 nt, Artificial Sequence
  Synthetic
gugcaauguccuagaguuu

SEQ ID NO: 6633 - RNA, 19 nt, Artificial Sequence
  Synthetic
cugaaggcauggagaaauu

SEQ ID NO: 6634 - RNA, 19 nt, Artificial Sequence
  Synthetic
gaguuuagcagaacaauua

SEQ ID NO: 6635 - RNA, 19 nt, Artificial Sequence
  Synthetic
aguaaaaggugcuuggaau

SEQ ID NO: 6636 - RNA, 19 nt, Artificial Sequence
  Synthetic
cgacuagaauaaagacuga

SEQ ID NO: 6637 - RNA, 19 nt, Artificial Sequence
  Synthetic
gaagaagccuuuucaagua

SEQ ID NO: 6638 - RNA, 19 nt, Artificial Sequence
  Synthetic
ggagugguauaaagacaaa

SEQ ID NO: 6639 - RNA, 19 nt, Artificial Sequence
  Synthetic
ggagaaauuuugugaagac

SEQ ID NO: 6640 - RNA, 19 nt, Artificial Sequence
  Synthetic
guggagugguauaaagaca

SEQ ID NO: 6641 - RNA, 19 nt, Artificial Sequence
  Synthetic
ugauuuaucugccaagaaa

SEQ ID NO: 6642 - RNA, 19 nt, Artificial Sequence
  Synthetic
caaugugauacaacagaaa

SEQ ID NO: 6643 - RNA, 19 nt, Artificial Sequence
  Synthetic
ggaaauuggaugcacaaaa

SEQ ID NO: 6644 - RNA, 19 nt, Artificial Sequence
  Synthetic
ggaaugguucuaugaauau

SEQ ID NO: 6645 - RNA, 19 nt, Artificial Sequence
  Synthetic
gaguuuguggagugguaua

SEQ ID NO: 6646 - RNA, 19 nt, Artificial Sequence
  Synthetic
gguauaaagacaaacagau

SEQ ID NO: 6647 - RNA, 19 nt, Artificial Sequence
  Synthetic
acgaguuuguggaguggua

SEQ ID NO: 6648 - RNA, 19 nt, Artificial Sequence
  Synthetic
caagaaaaguagacaugau

SEQ ID NO: 6649 - RNA, 19 nt, Artificial Sequence
  Synthetic
guauaaagacaaacagaug

SEQ ID NO: 6650 - RNA, 19 nt, Artificial Sequence
  Synthetic
guccuagaguuuagcagaa

SEQ ID NO: 6651 - RNA, 19 nt, Artificial Sequence
  Synthetic
ccaaugugauacaacagaa

SEQ ID NO: 6652 - RNA, 19 nt, Artificial Sequence
  Synthetic
caacuaugaugaagaugga

SEQ ID NO: 6653 - RNA, 19 nt, Artificial Sequence
  Synthetic
cccugaaggcauggagaaa

SEQ ID NO: 6654 - RNA, 19 nt, Artificial Sequence
  Synthetic
cuaugaauaugcaggaacu

SEQ ID NO: 6655 - RNA, 19 nt, Artificial Sequence
  Synthetic
cagauaugcguuugacuuu

SEQ ID NO: 6656 - RNA, 19 nt, Artificial Sequence
  Synthetic
cuagaguuuagcagaacaa

SEQ ID NO: 6657 - RNA, 19 nt, Artificial Sequence
  Synthetic
cagcaacuaugaugaagau

SEQ ID NO: 6658 - RNA, 19 nt, Artificial Sequence
  Synthetic
aggaaugacuucucuccaa

SEQ ID NO: 6659 - RNA, 19 nt, Artificial Sequence
  Synthetic
gcccugaaggcauggagaa

SEQ ID NO: 6660 - RNA, 19 nt, Artificial Sequence
  Synthetic
ugacaaagucugauggaua

SEQ ID NO: 6661 - RNA, 19 nt, Artificial Sequence
  Synthetic
gcagauagacugaagaaua

SEQ ID NO: 6662 - RNA, 19 nt, Artificial Sequence
  Synthetic
gcauuuacuuugaggcuua

SEQ ID NO: 6663 - RNA, 19 nt, Artificial Sequence
  Synthetic
gggaaugguuugagcuaau

SEQ ID NO: 6664 - RNA, 19 nt, Artificial Sequence
  Synthetic
cgaagaagguguacugcua

SEQ ID NO: 6665 - RNA, 19 nt, Artificial Sequence
  Synthetic
gcucagcccuguugggaaa

SEQ ID NO: 6666 - RNA, 19 nt, Artificial Sequence
  Synthetic
ugaaagaggagguggaaca

SEQ ID NO: 6667 - RNA, 19 nt, Artificial Sequence
  Synthetic
cagauagacugaagaauau

SEQ ID NO: 6668 - RNA, 19 nt, Artificial Sequence
  Synthetic
gcacuaagacaaaggaaca

SEQ ID NO: 6669 - RNA, 19 nt, Artificial Sequence
  Synthetic
agugaagcuugguggauua

SEQ ID NO: 6670 - RNA, 19 nt, Artificial Sequence
  Synthetic
cuucaaagcccaugcagua

SEQ ID NO: 6671 - RNA, 19 nt, Artificial Sequence
  Synthetic
gaaugaugauugaagagua

SEQ ID NO: 6672 - RNA, 19 nt, Artificial Sequence
  Synthetic
agacaugccuuguuggaau

SEQ ID NO: 6673 - RNA, 19 nt, Artificial Sequence
  Synthetic
gagaaguccaggaaugaua

SEQ ID NO: 6674 - RNA, 19 nt, Artificial Sequence
  Synthetic
gaacaugggcccucguuua

SEQ ID NO: 6675 - RNA, 19 nt, Artificial Sequence
  Synthetic
gcaagaacuuugagguugu

SEQ ID NO: 6676 - RNA, 19 nt, Artificial Sequence
  Synthetic
gagcaagaacuuugagguu

SEQ ID NO: 6677 - RNA, 19 nt, Artificial Sequence
  Synthetic
cugagaaccuuuuggcuau

SEQ ID NO: 6678 - RNA, 19 nt, Artificial Sequence
  Synthetic
agacaugagugaauaccua

SEQ ID NO: 6679 - RNA, 19 nt, Artificial Sequence
  Synthetic
ggauaagguuguagaacuc

SEQ ID NO: 6680 - RNA, 19 nt, Artificial Sequence
  Synthetic
guggauuaaauguggcaua

SEQ ID NO: 6681 - RNA, 19 nt, Artificial Sequence
  Synthetic
ugacaacaaccaagcauua

SEQ ID NO: 6682 - RNA, 19 nt, Artificial Sequence
  Synthetic
caugacagguggagcucaa

SEQ ID NO: 6683 - RNA, 19 nt, Artificial Sequence
  Synthetic
gcaaaagauuagaacagua

SEQ ID NO: 6684 - RNA, 19 nt, Artificial Sequence
  Synthetic
agaauaucgucgaacgcaa

SEQ ID NO: 6685 - RNA, 19 nt, Artificial Sequence
  Synthetic
aaucaggucaauuggauaa

SEQ ID NO: 6686 - RNA, 19 nt, Artificial Sequence
  Synthetic
agagagaaguccaggaaug

SEQ ID NO: 6687 - RNA, 19 nt, Artificial Sequence
  Synthetic
ccuugagagaugagcacaa

SEQ ID NO: 6688 - RNA, 19 nt, Artificial Sequence
  Synthetic
caaccaagcauuagugcau

SEQ ID NO: 6689 - RNA, 19 nt, Artificial Sequence
  Synthetic
ccugagaaccuuuuggcua

SEQ ID NO: 6690 - RNA, 19 nt, Artificial Sequence
  Synthetic
ggaaagagcuccagcgaaa

SEQ ID NO: 6691 - RNA, 19 nt, Artificial Sequence
  Synthetic
cuaaaugacuggcggaaua

SEQ ID NO: 6692 - RNA, 19 nt, Artificial Sequence
  Synthetic
gggaagaagaggagaagga

SEQ ID NO: 6693 - RNA, 19 nt, Artificial Sequence
  Synthetic
gggccucggugaagagaaa

SEQ ID NO: 6694 - RNA, 19 nt, Artificial Sequence
  Synthetic
gaaauaaacccaaccauaa

SEQ ID NO: 6695 - RNA, 19 nt, Artificial Sequence
  Synthetic
aaauugaggugaaggacaa

SEQ ID NO: 6696 - RNA, 19 nt, Artificial Sequence
  Synthetic
gggauaggguggucagcua

SEQ ID NO: 6697 - RNA, 19 nt, Artificial Sequence
  Synthetic
guuaacagcaguagaggaa

SEQ ID NO: 6698 - RNA, 19 nt, Artificial Sequence
  Synthetic
gaagggaagaagaggagaa

SEQ ID NO: 6699 - RNA, 19 nt, Artificial Sequence
  Synthetic
ccacauaccuccauuacua

SEQ ID NO: 6700 - RNA, 19 nt, Artificial Sequence
  Synthetic
ccacugacgugcuggaaau

SEQ ID NO: 6701 - RNA, 19 nt, Artificial Sequence
  Synthetic
aaacggaccagcagggaaa

SEQ ID NO: 6702 - RNA, 19 nt, Artificial Sequence
  Synthetic
ugaaauaaacccaaccaua

SEQ ID NO: 6703 - RNA, 19 nt, Artificial Sequence
  Synthetic
ccgcggaaaucgaccuaaa

SEQ ID NO: 6704 - RNA, 19 nt, Artificial Sequence
  Synthetic
cuugagugguucagguuua

SEQ ID NO: 6705 - RNA, 19 nt, Artificial Sequence
  Synthetic
gagaggagggccuggacua

SEQ ID NO: 6706 - RNA, 19 nt, Artificial Sequence
  Synthetic
acacacaggugacggagaa

SEQ ID NO: 6707 - RNA, 19 nt, Artificial Sequence
  Synthetic
acagagagccagugcaaga

SEQ ID NO: 6708 - RNA, 19 nt, Artificial Sequence
  Synthetic
gagcagaggcugagauuac

SEQ ID NO: 6709 - RNA, 19 nt, Artificial Sequence
  Synthetic
aagaagagauuauguccua

SEQ ID NO: 6710 - RNA, 19 nt, Artificial Sequence
  Synthetic
ggacauauuaccuugguuu

SEQ ID NO: 6711 - RNA, 19 nt, Artificial Sequence
  Synthetic
cuaggaagcugcagagagu

SEQ ID NO: 6712 - RNA, 19 nt, Artificial Sequence
  Synthetic
gaugaggucuuguccgaaa

SEQ ID NO: 6713 - RNA, 19 nt, Artificial Sequence
  Synthetic
gguaaaugcuacagaugaa

SEQ ID NO: 6714 - RNA, 19 nt, Artificial Sequence
  Synthetic
ggaagugccuugaaagaaa

SEQ ID NO: 6715 - RNA, 19 nt, Artificial Sequence
  Synthetic
gcaagaaguuaaaguggaa

SEQ ID NO: 6716 - RNA, 19 nt, Artificial Sequence
  Synthetic
guucauaugcugagaaauu

SEQ ID NO: 6717 - RNA, 19 nt, Artificial Sequence
  Synthetic
ugaaaugguuaguacgaaa

SEQ ID NO: 6718 - RNA, 19 nt, Artificial Sequence
  Synthetic
ggacauaauaguucacuua

SEQ ID NO: 6719 - RNA, 19 nt, Artificial Sequence
  Synthetic
gguaacaagcucugguaua

SEQ ID NO: 6720 - RNA, 19 nt, Artificial Sequence
  Synthetic
acaaagaaguguucaaaga

SEQ ID NO: 6721 - RNA, 19 nt, Artificial Sequence
  Synthetic
cuacauggcacuagaagaa

SEQ ID NO: 6722 - RNA, 19 nt, Artificial Sequence
  Synthetic
gguacaaugagcugaauua

SEQ ID NO: 6723 - RNA, 19 nt, Artificial Sequence
  Synthetic
gugcaaacauggacauaau

SEQ ID NO: 6724 - RNA, 19 nt, Artificial Sequence
  Synthetic
gauguuaacacuagagaau

SEQ ID NO: 6725 - RNA, 19 nt, Artificial Sequence
  Synthetic
ggagagaggcuuuggaagu

SEQ ID NO: 6726 - RNA, 19 nt, Artificial Sequence
  Synthetic
cagugugagugaagacuua

SEQ ID NO: 6727 - RNA, 19 nt, Artificial Sequence
  Synthetic
gaucaguguaucaaaguaa

SEQ ID NO: 6728 - RNA, 19 nt, Artificial Sequence
  Synthetic
guaacaagcucugguauaa

SEQ ID NO: 6729 - RNA, 19 nt, Artificial Sequence
  Synthetic
ggaaagugcuguaggaaau

SEQ ID NO: 6730 - RNA, 19 nt, Artificial Sequence
  Synthetic
cuucaagaauuaagggaua

SEQ ID NO: 6731 - RNA, 19 nt, Artificial Sequence
  Synthetic
guauugaaguaauggguaa

SEQ ID NO: 6732 - RNA, 19 nt, Artificial Sequence
  Synthetic
gaaacaaguuaaagcacaa

SEQ ID NO: 6733 - RNA, 19 nt, Artificial Sequence
  Synthetic
gaucagauguggugaguga

SEQ ID NO: 6734 - RNA, 19 nt, Artificial Sequence
  Synthetic
uggcagagcuagaacgcaa

SEQ ID NO: 6735 - RNA, 19 nt, Artificial Sequence
  Synthetic
gaauaaaagcacaagguua

SEQ ID NO: 6736 - RNA, 19 nt, Artificial Sequence
  Synthetic
acgcaaacuacgagaagua

SEQ ID NO: 6737 - RNA, 19 nt, Artificial Sequence
  Synthetic
uggaaagugcuguaggaaa

SEQ ID NO: 6738 - RNA, 19 nt, Artificial Sequence
  Synthetic
ccaaggagagagucagaaa

SEQ ID NO: 6739 - RNA, 19 nt, Artificial Sequence
  Synthetic
gaucauaggugaacaaaau

SEQ ID NO: 6740 - RNA, 19 nt, Artificial Sequence
  Synthetic
gagcuuaacaccuguauaa

SEQ ID NO: 6741 - RNA, 19 nt, Artificial Sequence
  Synthetic
gcgugaaauuucugagcuu

SEQ ID NO: 6742 - RNA, 19 nt, Artificial Sequence
  Synthetic
ucaacgagcucaugaagua

SEQ ID NO: 6743 - RNA, 19 nt, Artificial Sequence
  Synthetic
caggaaaggugauugauga

SEQ ID NO: 6744 - RNA, 19 nt, Artificial Sequence
  Synthetic
gcaaaauccuucaagacaa

SEQ ID NO: 6745 - RNA, 19 nt, Artificial Sequence
  Synthetic
gaaacaaggcugucacuau

SEQ ID NO: 6746 - RNA, 19 nt, Artificial Sequence
  Synthetic
gauauauccucuauggcaa

SEQ ID NO: 6747 - RNA, 19 nt, Artificial Sequence
  Synthetic
gggaauuguucauccauuu

SEQ ID NO: 6748 - RNA, 19 nt, Artificial Sequence
  Synthetic
cccuacaacuuuaaacaaa

SEQ ID NO: 6749 - RNA, 19 nt, Artificial Sequence
  Synthetic
gagaacauccucagcuuua

SEQ ID NO: 6750 - RNA, 19 nt, Artificial Sequence
  Synthetic
agaaggagccucuacaaua

SEQ ID NO: 6751 - RNA, 19 nt, Artificial Sequence
  Synthetic
agaaacaaguuaaagcaca

SEQ ID NO: 6752 - RNA, 19 nt, Artificial Sequence
  Synthetic
gaggaaauuaccaggauca

SEQ ID NO: 6753 - RNA, 19 nt, Artificial Sequence
  Synthetic
ggaacaagagacuauuaaa

SEQ ID NO: 6754 - RNA, 19 nt, Artificial Sequence
  Synthetic
ucuaaacgucuucggaaua

SEQ ID NO: 6755 - RNA, 19 nt, Artificial Sequence
  Synthetic
cauagacucucuuaggaaa

SEQ ID NO: 6756 - RNA, 19 nt, Artificial Sequence
  Synthetic
ccucuauggcaauggagua

SEQ ID NO: 6757 - RNA, 19 nt, Artificial Sequence
  Synthetic
gaacacaacuuaaacuuga

SEQ ID NO: 6758 - RNA, 19 nt, Artificial Sequence
  Synthetic
ccagaucauaggugaacaa

SEQ ID NO: 6759 - RNA, 19 nt, Artificial Sequence
  Synthetic
gauguaaacaggugguaaa

SEQ ID NO: 6760 - RNA, 19 nt, Artificial Sequence
  Synthetic
ccauagaacaucacugaaa

SEQ ID NO: 6761 - RNA, 19 nt, Artificial Sequence
  Synthetic
ugauagagcauucaggaua

SEQ ID NO: 6762 - RNA, 19 nt, Artificial Sequence
  Synthetic
caacauggccagaaauauu

SEQ ID NO: 6763 - RNA, 19 nt, Artificial Sequence
  Synthetic
uugcugacuucgaggauaa

SEQ ID NO: 6764 - RNA, 19 nt, Artificial Sequence
  Synthetic
ucacagugguuauggauuu

SEQ ID NO: 6765 - RNA, 19 nt, Artificial Sequence
  Synthetic
gaggcaaauaccuggauua

SEQ ID NO: 6766 - RNA, 19 nt, Artificial Sequence
  Synthetic
guaaacaggugguaaaguu

SEQ ID NO: 6767 - RNA, 19 nt, Artificial Sequence
  Synthetic
cguaggaaacugcgggcua

SEQ ID NO: 6768 - RNA, 19 nt, Artificial Sequence
  Synthetic
gcgaauggcuuuuguagca

SEQ ID NO: 6769 - RNA, 19 nt, Artificial Sequence
  Synthetic
ccacauuagugucuuuaua

SEQ ID NO: 6770 - RNA, 19 nt, Artificial Sequence
  Synthetic
gaauguacacugugguuau

SEQ ID NO: 6771 - RNA, 19 nt, Artificial Sequence
  Synthetic
ggaaauagacugucauucu

SEQ ID NO: 6772 - RNA, 19 nt, Artificial Sequence
  Synthetic
gggagaugaauaaauguua

SEQ ID NO: 6773 - RNA, 19 nt, Artificial Sequence
  Synthetic
ggacaaggccucugguucu

SEQ ID NO: 6774 - RNA, 19 nt, Artificial Sequence
  Synthetic
caauaaacccacuaauaga

SEQ ID NO: 6775 - RNA, 19 nt, Artificial Sequence
  Synthetic
guuaagcaaugaagguuau

SEQ ID NO: 6776 - RNA, 19 nt, Artificial Sequence
  Synthetic
gucaauaaacccacuaaua

SEQ ID NO: 6777 - RNA, 19 nt, Artificial Sequence
  Synthetic
ggaaggaacuuauuaccau

SEQ ID NO: 6778 - RNA, 19 nt, Artificial Sequence
  Synthetic
gaacugaccaauagacuca

SEQ ID NO: 6779 - RNA, 19 nt, Artificial Sequence
  Synthetic
ggacugggccauuuuauua

SEQ ID NO: 6780 - RNA, 19 nt, Artificial Sequence
  Synthetic
gugguuugguuuacauuaa

SEQ ID NO: 6781 - RNA, 19 nt, Artificial Sequence
  Synthetic
gcaaauaccuggauuaccu

SEQ ID NO: 6782 - RNA, 19 nt, Artificial Sequence
  Synthetic
caaugaagguuauuuccua

SEQ ID NO: 6783 - RNA, 19 nt, Artificial Sequence
  Synthetic
cagaagauuguuaugagua

SEQ ID NO: 6784 - RNA, 19 nt, Artificial Sequence
  Synthetic
cccuagaccugcacaagaa

SEQ ID NO: 6785 - RNA, 19 nt, Artificial Sequence
  Synthetic
ggcuggaucuagacggcaa

SEQ ID NO: 6786 - RNA, 19 nt, Artificial Sequence
  Synthetic
ggguaucuguucuacuaaa

SEQ ID NO: 6787 - RNA, 19 nt, Artificial Sequence
  Synthetic
ucgaggauaacuaagauua

SEQ ID NO: 6788 - RNA, 19 nt, Artificial Sequence
  Synthetic
uaacauacccgccaaggaa

SEQ ID NO: 6789 - RNA, 19 nt, Artificial Sequence
  Synthetic
aggaagaaacugagaauaa

SEQ ID NO: 6790 - RNA, 19 nt, Artificial Sequence
  Synthetic
gggaaauaguaaagaagua

SEQ ID NO: 6791 - RNA, 19 nt, Artificial Sequence
  Synthetic
gaggaaagaaagaggauua

SEQ ID NO: 6792 - RNA, 19 nt, Artificial Sequence
  Synthetic
ggacaaaucuucaggacuu

SEQ ID NO: 6793 - RNA, 19 nt, Artificial Sequence
  Synthetic
ccaaagaagucaggacaaa

SEQ ID NO: 6794 - RNA, 19 nt, Artificial Sequence
  Synthetic
gaggaaagaacaagcaaau

SEQ ID NO: 6795 - RNA, 19 nt, Artificial Sequence
  Synthetic
uagaagaguuacagaauga

SEQ ID NO: 6796 - RNA, 19 nt, Artificial Sequence
  Synthetic
uaucaaagcagcagccaaa

SEQ ID NO: 6797 - RNA, 19 nt, Artificial Sequence
  Synthetic
gauauaagaccgaagauca

SEQ ID NO: 6798 - RNA, 19 nt, Artificial Sequence
  Synthetic
ggaagaggaagcugagaaa

SEQ ID NO: 6799 - RNA, 19 nt, Artificial Sequence
  Synthetic
ugacagagugugagaagua

SEQ ID NO: 6800 - RNA, 19 nt, Artificial Sequence
  Synthetic
gcaaaguggguguggaaga

SEQ ID NO: 6801 - RNA, 19 nt, Artificial Sequence
  Synthetic
gcugggagcuggagaccaa

SEQ ID NO: 6802 - RNA, 19 nt, Artificial Sequence
  Synthetic
gcacauggauuuugacagu

SEQ ID NO: 6803 - RNA, 19 nt, Artificial Sequence
  Synthetic
gcccaaggcugaagauuua

SEQ ID NO: 6804 - RNA, 19 nt, Artificial Sequence
  Synthetic
ggauuaaacucucgauaga

SEQ ID NO: 6805 - RNA, 19 nt, Artificial Sequence
  Synthetic
ggaaauaaggagggaagua

SEQ ID NO: 6806 - RNA, 19 nt, Artificial Sequence
  Synthetic
gugaaagacuugugaagca

SEQ ID NO: 6807 - RNA, 19 nt, Artificial Sequence
  Synthetic
gcagaaguauguugaauau

SEQ ID NO: 6808 - RNA, 19 nt, Artificial Sequence
  Synthetic
gcuggaagcucuugauuau

SEQ ID NO: 6809 - RNA, 19 nt, Artificial Sequence
  Synthetic
ccagagguauacagaauua

SEQ ID NO: 6810 - RNA, 19 nt, Artificial Sequence
  Synthetic
caagggaacuggagacaau

SEQ ID NO: 6811 - RNA, 19 nt, Artificial Sequence
  Synthetic
aagaagaacugaaugaaga

SEQ ID NO: 6812 - RNA, 19 nt, Artificial Sequence
  Synthetic
ccggaaaccucuuuuauaa

SEQ ID NO: 6813 - RNA, 19 nt, Artificial Sequence
  Synthetic
ggagggaaguacaaagauu

SEQ ID NO: 6814 - RNA, 19 nt, Artificial Sequence
  Synthetic
ugucagaauugucguauua

SEQ ID NO: 6815 - RNA, 19 nt, Artificial Sequence
  Synthetic
agaaauggcugaugaaaua

SEQ ID NO: 6816 - RNA, 19 nt, Artificial Sequence
  Synthetic
gcgaagaagagcugaauaa

SEQ ID NO: 6817 - RNA, 19 nt, Artificial Sequence
  Synthetic
gugauaaauuggugggaau

SEQ ID NO: 6818 - RNA, 19 nt, Artificial Sequence
  Synthetic
ggaagaaacuauucagauu

SEQ ID NO: 6819 - RNA, 19 nt, Artificial Sequence
  Synthetic
gcaauaagcuccuuguaua

SEQ ID NO: 6820 - RNA, 19 nt, Artificial Sequence
  Synthetic
gaacaaacccugcuggaaa

SEQ ID NO: 6821 - RNA, 19 nt, Artificial Sequence
  Synthetic
aagcaaacuucaagaggua

SEQ ID NO: 6822 - RNA, 19 nt, Artificial Sequence
  Synthetic
cugaggagcuggagagaga

SEQ ID NO: 6823 - RNA, 19 nt, Artificial Sequence
  Synthetic
gcugcaggcuggaggcaua

SEQ ID NO: 6824 - RNA, 19 nt, Artificial Sequence
  Synthetic
ggaaaagaaaggagauauu

SEQ ID NO: 6825 - RNA, 19 nt, Artificial Sequence
  Synthetic
gguaacacaucaaggugaa

SEQ ID NO: 6826 - RNA, 19 nt, Artificial Sequence
  Synthetic
acaagcaagcuguggaaua

SEQ ID NO: 6827 - RNA, 19 nt, Artificial Sequence
  Synthetic
gagcaauacauguuacuaa

SEQ ID NO: 6828 - RNA, 19 nt, Artificial Sequence
  Synthetic
ggagagagagaguggauca

SEQ ID NO: 6829 - RNA, 19 nt, Artificial Sequence
  Synthetic
ugaaaguuaugguggagaa

SEQ ID NO: 6830 - RNA, 19 nt, Artificial Sequence
  Synthetic
ggauuuggccaguggaaaa

SEQ ID NO: 6831 - RNA, 19 nt, Artificial Sequence
  Synthetic
gggaagguauucauguaaa

SEQ ID NO: 6832 - RNA, 19 nt, Artificial Sequence
  Synthetic
guucucauguguugggaaa

SEQ ID NO: 6833 - RNA, 19 nt, Artificial Sequence
  Synthetic
aagaaauggcugaugaaau

SEQ ID NO: 6834 - RNA, 19 nt, Artificial Sequence
  Synthetic
ccgcuuaucuauuggaaaa

SEQ ID NO: 6835 - RNA, 19 nt, Artificial Sequence
  Synthetic
caaguaacaaaguaggaaa

SEQ ID NO: 6836 - RNA, 19 nt, Artificial Sequence
  Synthetic
ccagagaaauucacauaau

SEQ ID NO: 6837 - RNA, 19 nt, Artificial Sequence
  Synthetic
ggagaaauccagggacuua

SEQ ID NO: 6838 - RNA, 19 nt, Artificial Sequence
  Synthetic
ggcaaacacaagaggaauu

SEQ ID NO: 6839 - RNA, 19 nt, Artificial Sequence
  Synthetic
gagaacaccaauaugauaa

SEQ ID NO: 6840 - RNA, 19 nt, Artificial Sequence
  Synthetic
gggccaaacaagauggaca

SEQ ID NO: 6841 - RNA, 19 nt, Artificial Sequence
  Synthetic
ggaagguauucauguaaau

SEQ ID NO: 6842 - RNA, 19 nt, Artificial Sequence
  Synthetic
ccaugaaggaaaagcaaaa

SEQ ID NO: 6843 - RNA, 19 nt, Artificial Sequence
  Synthetic
agagaaggcuuguuaucaa

SEQ ID NO: 6844 - RNA, 19 nt, Artificial Sequence
  Synthetic
aggaaaacucagugaaaau

SEQ ID NO: 6845 - RNA, 19 nt, Artificial Sequence
  Synthetic
ugaagaacuuagaggauua

SEQ ID NO: 6846 - RNA, 19 nt, Artificial Sequence
  Synthetic
gaagauuugugcagaauaa

SEQ ID NO: 6847 - RNA, 19 nt, Artificial Sequence
  Synthetic
ggaagaagaacuagaugaa

SEQ ID NO: 6848 - RNA, 19 nt, Artificial Sequence
  Synthetic
ccaaauaccauguacauaa

SEQ ID NO: 6849 - RNA, 19 nt, Artificial Sequence
  Synthetic
ggaagagacucaagcagua

SEQ ID NO: 6850 - RNA, 19 nt, Artificial Sequence
  Synthetic
ggaagaagaggaugaagaa

SEQ ID NO: 6851 - RNA, 19 nt, Artificial Sequence
  Synthetic
ggaaugagguccaccacaa

SEQ ID NO: 6852 - RNA, 19 nt, Artificial Sequence
  Synthetic
ccacagucccagugaagaa

SEQ ID NO: 6853 - RNA, 19 nt, Artificial Sequence
  Synthetic
cgucagcaagagugaaaua

SEQ ID NO: 6854 - RNA, 19 nt, Artificial Sequence
  Synthetic
cagcaagagugaaauaaaa

SEQ ID NO: 6855 - RNA, 19 nt, Artificial Sequence
  Synthetic
aaacaagccaagaaaggua

SEQ ID NO: 6856 - RNA, 19 nt, Artificial Sequence
  Synthetic
gaacaaggauggaaguuug

SEQ ID NO: 6857 - RNA, 19 nt, Artificial Sequence
  Synthetic
ucacagggaccuugccuaa

SEQ ID NO: 6858 - RNA, 19 nt, Artificial Sequence
  Synthetic
ggaacaaggauggaaguuu

SEQ ID NO: 6859 - RNA, 19 nt, Artificial Sequence
  Synthetic
gggagugggagaacgacaa

SEQ ID NO: 6860 - RNA, 19 nt, Artificial Sequence
  Synthetic
cagggaagauggaguacca

SEQ ID NO: 6861 - RNA, 19 nt, Artificial Sequence
  Synthetic
ggaaguuugcaguguccaa

SEQ ID NO: 6862 - RNA, 19 nt, Artificial Sequence
  Synthetic
ucagcaagagugaaauaaa

SEQ ID NO: 6863 - RNA, 19 nt, Artificial Sequence
  Synthetic
gcucaguccuggccaguca

SEQ ID NO: 6864 - RNA, 19 nt, Artificial Sequence
  Synthetic
gguaaaaccugaccuggua

SEQ ID NO: 6865 - RNA, 19 nt, Artificial Sequence
  Synthetic
caacaaugggaacaaggau

SEQ ID NO: 6866 - RNA, 19 nt, Artificial Sequence
  Synthetic
ccaccacaagacagaguuu

SEQ ID NO: 6867 - RNA, 19 nt, Artificial Sequence
  Synthetic
gaguuuggcucuaaucuca

SEQ ID NO: 6868 - RNA, 19 nt, Artificial Sequence
  Synthetic
gggccaagccugagggaaa

SEQ ID NO: 6869 - RNA, 19 nt, Artificial Sequence
  Synthetic
caggaaaccucuugcagaa

SEQ ID NO: 6870 - RNA, 19 nt, Artificial Sequence
  Synthetic
agaugaggcugaugagcua

SEQ ID NO: 6871 - RNA, 19 nt, Artificial Sequence
  Synthetic
gcauugaggagaagugcua

SEQ ID NO: 6872 - RNA, 19 nt, Artificial Sequence
  Synthetic
gagcuaaggacuugcauuu

SEQ ID NO: 6873 - RNA, 19 nt, Artificial Sequence
  Synthetic
gggcaaggucuuucaggaa

SEQ ID NO: 6874 - RNA, 19 nt, Artificial Sequence
  Synthetic
caaaguggcccaaggucaa

SEQ ID NO: 6875 - RNA, 19 nt, Artificial Sequence
  Synthetic
agagggagguggaaaugaa

SEQ ID NO: 6876 - RNA, 19 nt, Artificial Sequence
  Synthetic
cgaaagaccuccacaccuu

SEQ ID NO: 6877 - RNA, 19 nt, Artificial Sequence
  Synthetic
gcauagagagccagagucu

SEQ ID NO: 6878 - RNA, 19 nt, Artificial Sequence
  Synthetic
gaauuucaauggaagcaua

SEQ ID NO: 6879 - RNA, 19 nt, Artificial Sequence
  Synthetic
ucucuuagauguggaaaua

SEQ ID NO: 6880 - RNA, 19 nt, Artificial Sequence
  Synthetic
cuguguaugucuuggauga

SEQ ID NO: 6881 - RNA, 19 nt, Artificial Sequence
  Synthetic
gaagcauaauccauguaaa

SEQ ID NO: 6882 - RNA, 19 nt, Artificial Sequence
  Synthetic
ggaaguacuccaugacaca

SEQ ID NO: 6883 - RNA, 19 nt, Artificial Sequence
  Synthetic
ccagaaaguuaacugauga

SEQ ID NO: 6884 - RNA, 19 nt, Artificial Sequence
  Synthetic
ccugauuuguugaagauuu

SEQ ID NO: 6885 - RNA, 19 nt, Artificial Sequence
  Synthetic
gugaauggcuacagcaucu

SEQ ID NO: 6886 - RNA, 19 nt, Artificial Sequence
  Synthetic
agacggagccacagcauuu

SEQ ID NO: 6887 - RNA, 19 nt, Artificial Sequence
  Synthetic
ggacuugcauuuucaguuu

SEQ ID NO: 6888 - RNA, 19 nt, Artificial Sequence
  Synthetic
gaucuguauuucaguguuu

SEQ ID NO: 6889 - RNA, 19 nt, Artificial Sequence
  Synthetic
gcaagaaucaacacuguau

SEQ ID NO: 6890 - RNA, 19 nt, Artificial Sequence
  Synthetic
gaaccuacugugugcauau

SEQ ID NO: 6891 - RNA, 19 nt, Artificial Sequence
  Synthetic
aaaugcagcugguagaauu

SEQ ID NO: 6892 - RNA, 19 nt, Artificial Sequence
  Synthetic
ggacuuggaucuccuuaua

SEQ ID NO: 6893 - RNA, 19 nt, Artificial Sequence
  Synthetic
ggaaacaggcucacagauu

SEQ ID NO: 6894 - RNA, 19 nt, Artificial Sequence
  Synthetic
gcgaggagucccugcaaua

SEQ ID NO: 6895 - RNA, 19 nt, Artificial Sequence
  Synthetic
auguggagauggagaacua

SEQ ID NO: 6896 - RNA, 19 nt, Artificial Sequence
  Synthetic
cguccuagaucgggaacaa

SEQ ID NO: 6897 - RNA, 19 nt, Artificial Sequence
  Synthetic
ccauguauguauuugagaa

SEQ ID NO: 6898 - RNA, 19 nt, Artificial Sequence
  Synthetic
ccaaagucuuacuguauau

SEQ ID NO: 6899 - RNA, 19 nt, Artificial Sequence
  Synthetic
gcgccuguguucuguguua

SEQ ID NO: 6900 - RNA, 19 nt, Artificial Sequence
  Synthetic
gggaaacacagcauuuaaa

SEQ ID NO: 6901 - RNA, 19 nt, Artificial Sequence
  Synthetic
uggagaacccaaagucuua

SEQ ID NO: 6902 - RNA, 19 nt, Artificial Sequence
  Synthetic
ccaaguagugcaaucauua

SEQ ID NO: 6903 - RNA, 19 nt, Artificial Sequence
  Synthetic
gcaauaagccccugcauuu

SEQ ID NO: 6904 - RNA, 19 nt, Artificial Sequence
  Synthetic
caacaauuacuuaggaugu

SEQ ID NO: 6905 - RNA, 19 nt, Artificial Sequence
  Synthetic
ucaccaaagcagacauaga

SEQ ID NO: 6906 - RNA, 19 nt, Artificial Sequence
  Synthetic
gacugagcacccagagaua

SEQ ID NO: 6907 - RNA, 19 nt, Artificial Sequence
  Synthetic
ucagagggauauucacuaa

SEQ ID NO: 6908 - RNA, 19 nt, Artificial Sequence
  Synthetic
uggaugauguggagaugga

SEQ ID NO: 6909 - RNA, 19 nt, Artificial Sequence
  Synthetic
cagcaugcuccgugauguu

SEQ ID NO: 6910 - RNA, 19 nt, Artificial Sequence
  Synthetic
ggugacguuucuauauuua

SEQ ID NO: 6911 - RNA, 19 nt, Artificial Sequence
  Synthetic
acccaaagucuuacuguau

SEQ ID NO: 6912 - RNA, 19 nt, Artificial Sequence
  Synthetic
ugcuauagaugccauguua

SEQ ID NO: 6913 - RNA, 19 nt, Artificial Sequence
  Synthetic
cccaaagucuuacuguaua

SEQ ID NO: 6914 - RNA, 19 nt, Artificial Sequence
  Synthetic
uugccaagcuccaaagacu

SEQ ID NO: 6915 - RNA, 19 nt, Artificial Sequence
  Synthetic
acauugguuuguagcauuu

SEQ ID NO: 6916 - RNA, 19 nt, Artificial Sequence
  Synthetic
aaaugaaaguugcuaguuc

SEQ ID NO: 6917 - RNA, 19 nt, Artificial Sequence
  Synthetic
ggucugugcucagcugaua

SEQ ID NO: 6918 - RNA, 19 nt, Artificial Sequence
  Synthetic
ccgccgaccuugcuauaga

SEQ ID NO: 6919 - RNA, 19 nt, Artificial Sequence
  Synthetic
ucaagaaggcagagcgaaa

SEQ ID NO: 6920 - RNA, 19 nt, Artificial Sequence
  Synthetic
cgaaaagggugaagaguuu

SEQ ID NO: 6921 - RNA, 19 nt, Artificial Sequence
  Synthetic
gcgaggaggaggaggagaa

SEQ ID NO: 6922 - RNA, 19 nt, Artificial Sequence
  Synthetic
ccacagaaauggcaaacua

SEQ ID NO: 6923 - RNA, 19 nt, Artificial Sequence
  Synthetic
cuucaaggaugcagaguau

SEQ ID NO: 6924 - RNA, 19 nt, Artificial Sequence
  Synthetic
ggagaaggcugcugacauu

SEQ ID NO: 6925 - RNA, 19 nt, Artificial Sequence
  Synthetic
aggcagagcgaaagggcaa

SEQ ID NO: 6926 - RNA, 19 nt, Artificial Sequence
  Synthetic
cagaacaggugauggaaga

SEQ ID NO: 6927 - RNA, 19 nt, Artificial Sequence
  Synthetic
cagcagaccucuucagauu

SEQ ID NO: 6928 - RNA, 19 nt, Artificial Sequence
  Synthetic
gaaccaagauagcaaagaa

SEQ ID NO: 6929 - RNA, 19 nt, Artificial Sequence
  Synthetic
ggugaagaguuuauccaaa

SEQ ID NO: 6930 - RNA, 19 nt, Artificial Sequence
  Synthetic
gcuuggugauuuugugaaa

SEQ ID NO: 6931 - RNA, 19 nt, Artificial Sequence
  Synthetic
cgagauagcuauacagacu

SEQ ID NO: 6932 - RNA, 19 nt, Artificial Sequence
  Synthetic
acuuggaccuugauggaaa

SEQ ID NO: 6933 - RNA, 19 nt, Artificial Sequence
  Synthetic
caggagaaguugaguuuga

SEQ ID NO: 6934 - RNA, 19 nt, Artificial Sequence
  Synthetic
uagcaaagaagguagacaa

SEQ ID NO: 6935 - RNA, 19 nt, Artificial Sequence
  Synthetic
guugggaagacgagcaaua

SEQ ID NO: 6936 - RNA, 19 nt, Artificial Sequence
  Synthetic
cggcgaaccaagauagcaa

SEQ ID NO: 6937 - RNA, 19 nt, Artificial Sequence
  Synthetic
cuauguugguucugacaaa

SEQ ID NO: 6938 - RNA, 19 nt, Artificial Sequence
  Synthetic
gugaagaguuuauccaaau

SEQ ID NO: 6939 - RNA, 19 nt, Artificial Sequence
  Synthetic
ggaaugugucuuugagaga

SEQ ID NO: 6940 - RNA, 19 nt, Artificial Sequence
  Synthetic
caaagagauugaugugauu

SEQ ID NO: 6941 - RNA, 19 nt, Artificial Sequence
  Synthetic
gaugaagcuuggugauuuu

SEQ ID NO: 6942 - RNA, 19 nt, Artificial Sequence
  Synthetic
agaagaagccuuugcugaa

SEQ ID NO: 6943 - RNA, 19 nt, Artificial Sequence
  Synthetic
gagcaaucaggcaggacaa

SEQ ID NO: 6944 - RNA, 19 nt, Artificial Sequence
  Synthetic
acaaagagauugaugugau

SEQ ID NO: 6945 - RNA, 19 nt, Artificial Sequence
  Synthetic
gcccaaaagaagaaauaua

SEQ ID NO: 6946 - RNA, 19 nt, Artificial Sequence
  Synthetic
gggagaaaguccucaaugu

SEQ ID NO: 6947 - RNA, 19 nt, Artificial Sequence
  Synthetic
agaaaggccugaagcccaa

SEQ ID NO: 6948 - RNA, 19 nt, Artificial Sequence
  Synthetic
gcuucaugaucgaguguga

SEQ ID NO: 6949 - RNA, 19 nt, Artificial Sequence
  Synthetic
cagaagagguuuuggagua

SEQ ID NO: 6950 - RNA, 19 nt, Artificial Sequence
  Synthetic
agaaacagaaugugaagua

SEQ ID NO: 6951 - RNA, 19 nt, Artificial Sequence
  Synthetic
ggacaauggaucaagauga

SEQ ID NO: 6952 - RNA, 19 nt, Artificial Sequence
  Synthetic
gcugaggagacuagacaua

SEQ ID NO: 6953 - RNA, 19 nt, Artificial Sequence
  Synthetic
ggaaacauucagugggaga

SEQ ID NO: 6954 - RNA, 19 nt, Artificial Sequence
  Synthetic
aaacagugguaucgacuua

SEQ ID NO: 6955 - RNA, 19 nt, Artificial Sequence
  Synthetic
gguagaaaaugaagagcau

SEQ ID NO: 6956 - RNA, 19 nt, Artificial Sequence
  Synthetic
gaguuugagcaguggagaa

SEQ ID NO: 6957 - RNA, 19 nt, Artificial Sequence
  Synthetic
uuaaagacaccaaggagaa

SEQ ID NO: 6958 - RNA, 19 nt, Artificial Sequence
  Synthetic
uaucaaagguguagcccau

SEQ ID NO: 6959 - RNA, 19 nt, Artificial Sequence
  Synthetic
gaugaagcuccuuguguua

SEQ ID NO: 6960 - RNA, 19 nt, Artificial Sequence
  Synthetic
gucccuaaauguuggcaaa

SEQ ID NO: 6961 - RNA, 19 nt, Artificial Sequence
  Synthetic
ccugugugauagaugauaa

SEQ ID NO: 6962 - RNA, 19 nt, Artificial Sequence
  Synthetic
ggaugaagcuccuuguguu

SEQ ID NO: 6963 - RNA, 19 nt, Artificial Sequence
  Synthetic
caguaagaagcauggauga

SEQ ID NO: 6964 - RNA, 19 nt, Artificial Sequence
  Synthetic
caucauauuuggaggacuc

SEQ ID NO: 6965 - RNA, 19 nt, Artificial Sequence
  Synthetic
ggaagaaacugugcuggaa

SEQ ID NO: 6966 - RNA, 19 nt, Artificial Sequence
  Synthetic
caugaaggcuguccaggaa

SEQ ID NO: 6967 - RNA, 19 nt, Artificial Sequence
  Synthetic
uguacgugcuggacauuaa

SEQ ID NO: 6968 - RNA, 19 nt, Artificial Sequence
  Synthetic
aggcuguccaggaaggaaa

SEQ ID NO: 6969 - RNA, 19 nt, Artificial Sequence
  Synthetic
aguuugagcaguggagaaa

SEQ ID NO: 6970 - RNA, 19 nt, Artificial Sequence
  Synthetic
caacucuggucguguacaa

SEQ ID NO: 6971 - RNA, 19 nt, Artificial Sequence
  Synthetic
uuggaggacucauggacaa

SEQ ID NO: 6972 - RNA, 19 nt, Artificial Sequence
  Synthetic
uuguacgagcaaagagaua

SEQ ID NO: 6973 - RNA, 19 nt, Artificial Sequence
  Synthetic
agagagauucuuugaugaa

SEQ ID NO: 6974 - RNA, 19 nt, Artificial Sequence
  Synthetic
acaagaaacagaaugugaa

SEQ ID NO: 6975 - RNA, 19 nt, Artificial Sequence
  Synthetic
cgggucaaauggaaaguau

SEQ ID NO: 6976 - RNA, 19 nt, Artificial Sequence
  Synthetic
aguaagaagcauggaugaa

SEQ ID NO: 6977 - RNA, 19 nt, Artificial Sequence
  Synthetic
auuaaagacaccaaggaga

SEQ ID NO: 6978 - RNA, 19 nt, Artificial Sequence
  Synthetic
gacaagaaacagaauguga

SEQ ID NO: 6979 - RNA, 19 nt, Artificial Sequence
  Synthetic
ccugauagcaaaugggaaa

SEQ ID NO: 6980 - RNA, 19 nt, Artificial Sequence
  Synthetic
gcaaagaagaagaaggagu

SEQ ID NO: 6981 - RNA, 19 nt, Artificial Sequence
  Synthetic
ccuuagaugcauucagaaa

SEQ ID NO: 6982 - RNA, 19 nt, Artificial Sequence
  Synthetic
ucgaagaugucguugcaaa

SEQ ID NO: 6983 - RNA, 19 nt, Artificial Sequence
  Synthetic
cagaaagagauguugagaa

SEQ ID NO: 6984 - RNA, 19 nt, Artificial Sequence
  Synthetic
guuggaaacaaguguaaua

SEQ ID NO: 6985 - RNA, 19 nt, Artificial Sequence
  Synthetic
ccaucgaccuguucaaaua

SEQ ID NO: 6986 - RNA, 19 nt, Artificial Sequence
  Synthetic
aagaaacacucuaagacua

SEQ ID NO: 6987 - RNA, 19 nt, Artificial Sequence
  Synthetic
ccugggaauuagaggaaaa

SEQ ID NO: 6988 - RNA, 19 nt, Artificial Sequence
  Synthetic
guaaagaucuacugaggca

SEQ ID NO: 6989 - RNA, 19 nt, Artificial Sequence
  Synthetic
aggcaaagaagaagaagga

SEQ ID NO: 6990 - RNA, 19 nt, Artificial Sequence
  Synthetic
gaugguaaaucuacaacaa

SEQ ID NO: 6991 - RNA, 19 nt, Artificial Sequence
  Synthetic
agaaggaguuuaugguuuu

SEQ ID NO: 6992 - RNA, 19 nt, Artificial Sequence
  Synthetic
caggauaaauacugcaaca

SEQ ID NO: 6993 - RNA, 19 nt, Artificial Sequence
  Synthetic
ggaauuuggcagagaggca

SEQ ID NO: 6994 - RNA, 19 nt, Artificial Sequence
  Synthetic
gaaaagaaaacuaaggaga

SEQ ID NO: 6995 - RNA, 19 nt, Artificial Sequence
  Synthetic
gguaaaucuacaacaacaa

SEQ ID NO: 6996 - RNA, 19 nt, Artificial Sequence
  Synthetic
caaaagaccuggaggauca

SEQ ID NO: 6997 - RNA, 19 nt, Artificial Sequence
  Synthetic
aguggaaagugcugaacua

SEQ ID NO: 6998 - RNA, 19 nt, Artificial Sequence
  Synthetic
ggaaagugcugaacuauga

SEQ ID NO: 6999 - RNA, 19 nt, Artificial Sequence
  Synthetic
ugaacuaugacaagacaaa

SEQ ID NO: 7000 - RNA, 19 nt, Artificial Sequence
  Synthetic
gagcuggucaugagaguca

SEQ ID NO: 7001 - RNA, 19 nt, Artificial Sequence
  Synthetic
agacaaaagaccuggagga

SEQ ID NO: 7002 - RNA, 19 nt, Artificial Sequence
  Synthetic
ucauggacguggugugcau

SEQ ID NO: 7003 - RNA, 19 nt, Artificial Sequence
  Synthetic
ggucaugagagucacgaca

SEQ ID NO: 7004 - RNA, 19 nt, Artificial Sequence
  Synthetic
cugucaaccagcaguggaa

SEQ ID NO: 7005 - RNA, 19 nt, Artificial Sequence
  Synthetic
gcuacgggauguauggcuu

SEQ ID NO: 7006 - RNA, 19 nt, Artificial Sequence
  Synthetic
cgucaucgccauaagcaca

SEQ ID NO: 7007 - RNA, 19 nt, Artificial Sequence
  Synthetic
gagagcuggucaugagagu

SEQ ID NO: 7008 - RNA, 19 nt, Artificial Sequence
  Synthetic
gcauaggucucaucaucca

SEQ ID NO: 7009 - RNA, 19 nt, Artificial Sequence
  Synthetic
gugcauaggucucaucauc

SEQ ID NO: 7010 - RNA, 19 nt, Artificial Sequence
  Synthetic
gugcugaacuaugacaaga

SEQ ID NO: 7011 - RNA, 19 nt, Artificial Sequence
  Synthetic
guaccacgucaucgccaua

SEQ ID NO: 7012 - RNA, 19 nt, Artificial Sequence
  Synthetic
gagcugugcuacuacaagu

SEQ ID NO: 7013 - RNA, 19 nt, Artificial Sequence
  Synthetic
gcugaacuaugacaagaca

SEQ ID NO: 7014 - RNA, 19 nt, Artificial Sequence
  Synthetic
ucaugagagucacgacagu

SEQ ID NO: 7015 - RNA, 19 nt, Artificial Sequence
  Synthetic
uggcucaucuggucaacuu

SEQ ID NO: 7016 - RNA, 19 nt, Artificial Sequence
  Synthetic
cauccugagucacuugaga

SEQ ID NO: 7017 - RNA, 19 nt, Artificial Sequence
  Synthetic
ggauguauggcuucaugga

SEQ ID NO: 7018 - RNA, 19 nt, Artificial Sequence
  Synthetic
gcugcgagcugugcuacua

SEQ ID NO: 7019 - RNA, 19 nt, Artificial Sequence
  Synthetic
ccucaucgccaguauuucu

SEQ ID NO: 7020 - RNA, 19 nt, Artificial Sequence
  Synthetic
gccgagagcuggucaugag

SEQ ID NO: 7021 - RNA, 19 nt, Artificial Sequence
  Synthetic
cauccacccaggccaauau

SEQ ID NO: 7022 - RNA, 19 nt, Artificial Sequence
  Synthetic
gguguaccgcaucuuuaaa

SEQ ID NO: 7023 - RNA, 19 nt, Artificial Sequence
  Synthetic
caucaccacugugcuuaua

SEQ ID NO: 7024 - RNA, 19 nt, Artificial Sequence
  Synthetic
cuacaaguaccacgucauc

SEQ ID NO: 7025 - RNA, 19 nt, Artificial Sequence
  Synthetic
ugugauggcucggucaagu

SEQ ID NO: 7026 - RNA, 19 nt, Artificial Sequence
  Synthetic
ggaagaagguaaagaguga

SEQ ID NO: 7027 - RNA, 19 nt, Artificial Sequence
  Synthetic
ggaagaaggccaagaggaa

SEQ ID NO: 7028 - RNA, 19 nt, Artificial Sequence
  Synthetic
ggaagaaagccaaggacaa

SEQ ID NO: 7029 - RNA, 19 nt, Artificial Sequence
  Synthetic
cggaagaggaagacaagaa

SEQ ID NO: 7030 - RNA, 19 nt, Artificial Sequence
  Synthetic
cggcagagugagagaguga

SEQ ID NO: 7031 - RNA, 19 nt, Artificial Sequence
  Synthetic
cagcaagaguggagagauc

SEQ ID NO: 7032 - RNA, 19 nt, Artificial Sequence
  Synthetic
gugaagagcuuucugcaaa

SEQ ID NO: 7033 - RNA, 19 nt, Artificial Sequence
  Synthetic
cgacggaagaggaagacaa

SEQ ID NO: 7034 - RNA, 19 nt, Artificial Sequence
  Synthetic
gggaccaucaagagggaaa

SEQ ID NO: 7035 - RNA, 19 nt, Artificial Sequence
  Synthetic
agaagagggaagaagguaa

SEQ ID NO: 7036 - RNA, 19 nt, Artificial Sequence
  Synthetic
gaagagggaagaagguaaa

SEQ ID NO: 7037 - RNA, 19 nt, Artificial Sequence
  Synthetic
acgauaaggagcagaggaa

SEQ ID NO: 7038 - RNA, 19 nt, Artificial Sequence
  Synthetic
agugagagagugagagcaa

SEQ ID NO: 7039 - RNA, 19 nt, Artificial Sequence
  Synthetic
aaaccaagaaggaggagua

SEQ ID NO: 7040 - RNA, 19 nt, Artificial Sequence
  Synthetic
ccaagaaggaggaguacau

SEQ ID NO: 7041 - RNA, 19 nt, Artificial Sequence
  Synthetic
cgacagcagugaagagcuu

SEQ ID NO: 7042 - RNA, 19 nt, Artificial Sequence
  Synthetic
gcuaagaggaagaaagcca

SEQ ID NO: 7043 - RNA, 19 nt, Artificial Sequence
  Synthetic
ugaccaaggaggaguacaa

SEQ ID NO: 7044 - RNA, 19 nt, Artificial Sequence
  Synthetic
gaaagaucccaguggagaa

SEQ ID NO: 7045 - RNA, 19 nt, Artificial Sequence
  Synthetic
gagaguaggaagaagaaga

SEQ ID NO: 7046 - RNA, 19 nt, Artificial Sequence
  Synthetic
gugaagaagagaagaggga

SEQ ID NO: 7047 - RNA, 19 nt, Artificial Sequence
  Synthetic
ccaaagaucaggagagaug

SEQ ID NO: 7048 - RNA, 19 nt, Artificial Sequence
  Synthetic
ggaagaaagugccgggaag

SEQ ID NO: 7049 - RNA, 19 nt, Artificial Sequence
  Synthetic
agaagagggaggugaccaa

SEQ ID NO: 7050 - RNA, 19 nt, Artificial Sequence
  Synthetic
aggcguacguggacaagua

SEQ ID NO: 7051 - RNA, 19 nt, Artificial Sequence
  Synthetic
ccagcaacucggaggagaa

SEQ ID NO: 7052 - RNA, 19 nt, Artificial Sequence
  Synthetic
gaagaagagaagagggaag

SEQ ID NO: 7053 - RNA, 19 nt, Artificial Sequence
  Synthetic
gcaagaguggagagaucaa

SEQ ID NO: 7054 - RNA, 19 nt, Artificial Sequence
  Synthetic
ccuacacgguggagagcau

SEQ ID NO: 7055 - RNA, 19 nt, Artificial Sequence
  Synthetic
gccaagaggaagagggugu

SEQ ID NO: 7056 - RNA, 19 nt, Artificial Sequence
  Synthetic
agaaagacgucguguacaa

SEQ ID NO: 7057 - RNA, 19 nt, Artificial Sequence
  Synthetic
caacaucgcucguggacaa

SEQ ID NO: 7058 - RNA, 19 nt, Artificial Sequence
  Synthetic
ccaagaaguucguggacau

SEQ ID NO: 7059 - RNA, 19 nt, Artificial Sequence
  Synthetic
gugaagaucugcauggaaa

SEQ ID NO: 7060 - RNA, 19 nt, Artificial Sequence
  Synthetic
cggcagagcagcugguuua

SEQ ID NO: 7061 - RNA, 19 nt, Artificial Sequence
  Synthetic
ucaaugauguuguggauaa

SEQ ID NO: 7062 - RNA, 19 nt, Artificial Sequence
  Synthetic
gguuugggcuacaggguua

SEQ ID NO: 7063 - RNA, 19 nt, Artificial Sequence
  Synthetic
agaaacuggcugugggaaa

SEQ ID NO: 7064 - RNA, 19 nt, Artificial Sequence
  Synthetic
cugaaauggaaucgagaaa

SEQ ID NO: 7065 - RNA, 19 nt, Artificial Sequence
  Synthetic
gcuuaaaucucaacaagaa

SEQ ID NO: 7066 - RNA, 19 nt, Artificial Sequence
  Synthetic
caacuaaagaaaugaggaa

SEQ ID NO: 7067 - RNA, 19 nt, Artificial Sequence
  Synthetic
gcuuaaagaagguggagau

SEQ ID NO: 7068 - RNA, 19 nt, Artificial Sequence
  Synthetic
ggaaagguauucuguuaua

SEQ ID NO: 7069 - RNA, 19 nt, Artificial Sequence
  Synthetic
gcacagaacucuuuguuga

SEQ ID NO: 7070 - RNA, 19 nt, Artificial Sequence
  Synthetic
gcagaaggcuuuuaaauuu

SEQ ID NO: 7071 - RNA, 19 nt, Artificial Sequence
  Synthetic
ggagaucgcuugagacgaa

SEQ ID NO: 7072 - RNA, 19 nt, Artificial Sequence
  Synthetic
ggguguaccuggugcggaa

SEQ ID NO: 7073 - RNA, 19 nt, Artificial Sequence
  Synthetic
ccaaagaggugauagacau

SEQ ID NO: 7074 - RNA, 19 nt, Artificial Sequence
  Synthetic
acacggaaguggagagguu

SEQ ID NO: 7075 - RNA, 19 nt, Artificial Sequence
  Synthetic
cggagaugcugacaagaaa

SEQ ID NO: 7076 - RNA, 19 nt, Artificial Sequence
  Synthetic
gagcaaauucauuggcgaa

SEQ ID NO: 7077 - RNA, 19 nt, Artificial Sequence
  Synthetic
gauugucauugaagagaaa

SEQ ID NO: 7078 - RNA, 19 nt, Artificial Sequence
  Synthetic
gggaagaggaacagccuau

SEQ ID NO: 7079 - RNA, 19 nt, Artificial Sequence
  Synthetic
ucaaagaaguccuguguga

SEQ ID NO: 7080 - RNA, 19 nt, Artificial Sequence
  Synthetic
caguggagccugagagaca

SEQ ID NO: 7081 - RNA, 19 nt, Artificial Sequence
  Synthetic
acuaaagaaaugaggaaca

SEQ ID NO: 7082 - RNA, 19 nt, Artificial Sequence
  Synthetic
acacagaauugucaacuaa

SEQ ID NO: 7083 - RNA, 19 nt, Artificial Sequence
  Synthetic
ggaaucgagaaaugagaua

SEQ ID NO: 7084 - RNA, 19 nt, Artificial Sequence
  Synthetic
ccaauuugcccgaggccaa

SEQ ID NO: 7085 - RNA, 19 nt, Artificial Sequence
  Synthetic
ccuacgaaacgguguguaa

SEQ ID NO: 7086 - RNA, 19 nt, Artificial Sequence
  Synthetic
gagcaauagaggaggaaaa

SEQ ID NO: 7087 - RNA, 19 nt, Artificial Sequence
  Synthetic
gugaaaaugaagaggauaa

SEQ ID NO: 7088 - RNA, 19 nt, Artificial Sequence
  Synthetic
gcuacaaaugugugguaaa

SEQ ID NO: 7089 - RNA, 19 nt, Artificial Sequence
  Synthetic
gaguagagggaguggaaca

SEQ ID NO: 7090 - RNA, 19 nt, Artificial Sequence
  Synthetic
gaggaaacuucgagaucau

SEQ ID NO: 7091 - RNA, 19 nt, Artificial Sequence
  Synthetic
cgaagaaagaugaggaaac

SEQ ID NO: 7092 - RNA, 19 nt, Artificial Sequence
  Synthetic
cugacaaauggaagaauaa

SEQ ID NO: 7093 - RNA, 19 nt, Artificial Sequence
  Synthetic
guucaggaguagagggagu

SEQ ID NO: 7094 - RNA, 19 nt, Artificial Sequence
  Synthetic
caguuaaaucucagggaau

SEQ ID NO: 7095 - RNA, 19 nt, Artificial Sequence
  Synthetic
ccuaguacagggagugaaa

SEQ ID NO: 7096 - RNA, 19 nt, Artificial Sequence
  Synthetic
acacaaagauaucuggaga

SEQ ID NO: 7097 - RNA, 19 nt, Artificial Sequence
  Synthetic
cguuaugaaucuuggaguu

SEQ ID NO: 7098 - RNA, 19 nt, Artificial Sequence
  Synthetic
cagaaaggccaguugguga

SEQ ID NO: 7099 - RNA, 19 nt, Artificial Sequence
  Synthetic
ccagauaaguaauggcagu

SEQ ID NO: 7100 - RNA, 19 nt, Artificial Sequence
  Synthetic
cuuugaaauuccagacaau

SEQ ID NO: 7101 - RNA, 19 nt, Artificial Sequence
  Synthetic
gaaauuagucagaggguac

SEQ ID NO: 7102 - RNA, 19 nt, Artificial Sequence
  Synthetic
cgacgagcacagaggaaga

SEQ ID NO: 7103 - RNA, 19 nt, Artificial Sequence
  Synthetic
gaaagaacugagagaagau

SEQ ID NO: 7104 - RNA, 19 nt, Artificial Sequence
  Synthetic
ggaaaguauaugcagaauu

SEQ ID NO: 7105 - RNA, 19 nt, Artificial Sequence
  Synthetic
gggaguggaacaugaagaa

SEQ ID NO: 7106 - RNA, 19 nt, Artificial Sequence
  Synthetic
ccuucagaauggaaaguau

SEQ ID NO: 7107 - RNA, 19 nt, Artificial Sequence
  Synthetic
gauacaaagaugucugaau

SEQ ID NO: 7108 - RNA, 19 nt, Artificial Sequence
  Synthetic
caaacaacgucuugggaag

SEQ ID NO: 7109 - RNA, 19 nt, Artificial Sequence
  Synthetic
gaggauaaaagaaggacaa

SEQ ID NO: 7110 - RNA, 19 nt, Artificial Sequence
  Synthetic
guaccugaauggagagcga

SEQ ID NO: 7111 - RNA, 19 nt, Artificial Sequence
  Synthetic
cagcuguguuggaguagaa

SEQ ID NO: 7112 - RNA, 19 nt, Artificial Sequence
  Synthetic
cugaaagaacugagagaag

SEQ ID NO: 7113 - RNA, 19 nt, Artificial Sequence
  Synthetic
cuucagaauggaaaguaua

SEQ ID NO: 7114 - RNA, 19 nt, Artificial Sequence
  Synthetic
aguuaaaucucagggaauu

SEQ ID NO: 7115 - RNA, 19 nt, Artificial Sequence
  Synthetic
ugucaagacugaagaucca

SEQ ID NO: 7116 - RNA, 19 nt, Artificial Sequence
  Synthetic
ccgagaaaccgcagcacua

SEQ ID NO: 7117 - RNA, 19 nt, Artificial Sequence
  Synthetic
uggagaagacuuucgauaa

SEQ ID NO: 7118 - RNA, 19 nt, Artificial Sequence
  Synthetic
ccauggaggccuugcagaa

SEQ ID NO: 7119 - RNA, 19 nt, Artificial Sequence
  Synthetic
ugaaaugccuuaaguguca

SEQ ID NO: 7120 - RNA, 19 nt, Artificial Sequence
  Synthetic
acacguaccugaaagaauu

SEQ ID NO: 7121 - RNA, 19 nt, Artificial Sequence
  Synthetic
cuggagaagacuuucgaua

SEQ ID NO: 7122 - RNA, 19 nt, Artificial Sequence
  Synthetic
ggucugaacgggaugaaca

SEQ ID NO: 7123 - RNA, 19 nt, Artificial Sequence
  Synthetic
ggagaagacuuucgauaac

SEQ ID NO: 7124 - RNA, 19 nt, Artificial Sequence
  Synthetic
ggugaaaugccuuaagugu

SEQ ID NO: 7125 - RNA, 19 nt, Artificial Sequence
  Synthetic
cacuggaggugcaggugaa

SEQ ID NO: 7126 - RNA, 19 nt, Artificial Sequence
  Synthetic
cauuagagcccaggaguca

SEQ ID NO: 7127 - RNA, 19 nt, Artificial Sequence
  Synthetic
gggacggcaccuucaauua

SEQ ID NO: 7128 - RNA, 19 nt, Artificial Sequence
  Synthetic
uggaugaccuggaccugaa

SEQ ID NO: 7129 - RNA, 19 nt, Artificial Sequence
  Synthetic
gggagaaggugcuggugaa

SEQ ID NO: 7130 - RNA, 19 nt, Artificial Sequence
  Synthetic
aagagaaagugcuggagaa

SEQ ID NO: 7131 - RNA, 19 nt, Artificial Sequence
  Synthetic
gcaacuacaaggaggacua

SEQ ID NO: 7132 - RNA, 19 nt, Artificial Sequence
  Synthetic
ggagaaagcgcuggagaau

SEQ ID NO: 7133 - RNA, 19 nt, Artificial Sequence
  Synthetic
gggugacagugcuggagaa

SEQ ID NO: 7134 - RNA, 19 nt, Artificial Sequence
  Synthetic
ggaacagcgagcagaucaa

SEQ ID NO: 7135 - RNA, 19 nt, Artificial Sequence
  Synthetic
gggaggaugugacaaggaa

SEQ ID NO: 7136 - RNA, 19 nt, Artificial Sequence
  Synthetic
ucgagugggcggaggauuu

SEQ ID NO: 7137 - RNA, 19 nt, Artificial Sequence
  Synthetic
ggugauccugggagagauu

SEQ ID NO: 7138 - RNA, 19 nt, Artificial Sequence
  Synthetic
agaaagugcuggagaaugg

SEQ ID NO: 7139 - RNA, 19 nt, Artificial Sequence
  Synthetic
gggaacagcgagcagauca

SEQ ID NO: 7140 - RNA, 19 nt, Artificial Sequence
  Synthetic
ggagaggccaccagagacu

SEQ ID NO: 7141 - RNA, 19 nt, Artificial Sequence
  Synthetic
cgucaaaugugcugaggaa

SEQ ID NO: 7142 - RNA, 19 nt, Artificial Sequence
  Synthetic
gcaaagagcuggaaaagaa

SEQ ID NO: 7143 - RNA, 19 nt, Artificial Sequence
  Synthetic
ugaaagcacuggacaauaa

SEQ ID NO: 7144 - RNA, 19 nt, Artificial Sequence
  Synthetic
ggaugaaggagacgaguau

SEQ ID NO: 7145 - RNA, 19 nt, Artificial Sequence
  Synthetic
ucacaagguaguucaguua

SEQ ID NO: 7146 - RNA, 19 nt, Artificial Sequence
  Synthetic
ggagcuuggcuuugauuua

SEQ ID NO: 7147 - RNA, 19 nt, Artificial Sequence
  Synthetic
ggguauagaugaccuggaa

SEQ ID NO: 7148 - RNA, 19 nt, Artificial Sequence
  Synthetic
guauggagugugacaauaa

SEQ ID NO: 7149 - RNA, 19 nt, Artificial Sequence
  Synthetic
ugauuuagaccgagaaguu

SEQ ID NO: 7150 - RNA, 19 nt, Artificial Sequence
  Synthetic
agagggaaaugauguuaua

SEQ ID NO: 7151 - RNA, 19 nt, Artificial Sequence
  Synthetic
gcauaggucucuuagauga

SEQ ID NO: 7152 - RNA, 19 nt, Artificial Sequence
  Synthetic
gaagacgaagugagugaua

SEQ ID NO: 7153 - RNA, 19 nt, Artificial Sequence
  Synthetic
caacucauccugaagguua

SEQ ID NO: 7154 - RNA, 19 nt, Artificial Sequence
  Synthetic
ugacaucgcaagcgugaaa

SEQ ID NO: 7155 - RNA, 19 nt, Artificial Sequence
  Synthetic
gaauauuccaccaggcuau

SEQ ID NO: 7156 - RNA, 19 nt, Artificial Sequence
  Synthetic
gaagaggccaguaaagcua

SEQ ID NO: 7157 - RNA, 19 nt, Artificial Sequence
  Synthetic
gcgaggagguggagcagaa

SEQ ID NO: 7158 - RNA, 19 nt, Artificial Sequence
  Synthetic
ggggaaagaaggagagcaa

SEQ ID NO: 7159 - RNA, 19 nt, Artificial Sequence
  Synthetic
gggaaggccugaagggacu

SEQ ID NO: 7160 - RNA, 19 nt, Artificial Sequence
  Synthetic
uggagaagcuggaggugga

SEQ ID NO: 7161 - RNA, 19 nt, Artificial Sequence
  Synthetic
gcgagaaggaggagcugga

SEQ ID NO: 7162 - RNA, 19 nt, Artificial Sequence
  Synthetic
aggagagcaaggaggagua

SEQ ID NO: 7163 - RNA, 19 nt, Artificial Sequence
  Synthetic
ggaaagaaggagagcaagg

SEQ ID NO: 7164 - RNA, 19 nt, Artificial Sequence
  Synthetic
ugacaaaacuccaggcucu

SEQ ID NO: 7165 - RNA, 19 nt, Artificial Sequence
  Synthetic
agaagcuguuugaggacau

SEQ ID NO: 7166 - RNA, 19 nt, Artificial Sequence
  Synthetic
gaacaggagcugagccgca

SEQ ID NO: 7167 - RNA, 19 nt, Artificial Sequence
  Synthetic
agaaggaggagcuggagga

SEQ ID NO: 7168 - RNA, 19 nt, Artificial Sequence
  Synthetic
gggcaggguacgacuauca

SEQ ID NO: 7169 - RNA, 19 nt, Artificial Sequence
  Synthetic
agaaggagagcaaggagga

SEQ ID NO: 7170 - RNA, 19 nt, Artificial Sequence
  Synthetic
aggcagaaugcgagaacac

SEQ ID NO: 7171 - RNA, 19 nt, Artificial Sequence
  Synthetic
gcagaaugcgagaacacca

SEQ ID NO: 7172 - RNA, 19 nt, Artificial Sequence
  Synthetic
cgguggugcuggacccaau

SEQ ID NO: 7173 - RNA, 19 nt, Artificial Sequence
  Synthetic
agcaggagguggugcagau

SEQ ID NO: 7174 - RNA, 19 nt, Artificial Sequence
  Synthetic
ccagauugggauugcggau

SEQ ID NO: 7175 - RNA, 19 nt, Artificial Sequence
  Synthetic
gagcaaaaccauucaaaua

SEQ ID NO: 7176 - RNA, 19 nt, Artificial Sequence
  Synthetic
ccaaggagaaagaaacaaa

SEQ ID NO: 7177 - RNA, 19 nt, Artificial Sequence
  Synthetic
ccucaugagccaaggagaa

SEQ ID NO: 7178 - RNA, 19 nt, Artificial Sequence
  Synthetic
cuguuagacuugaaugaaa

SEQ ID NO: 7179 - RNA, 19 nt, Artificial Sequence
  Synthetic
cuccagaaauugacugaaa

SEQ ID NO: 7180 - RNA, 19 nt, Artificial Sequence
  Synthetic
cuggaaagaaggagauaca

SEQ ID NO: 7181 - RNA, 19 nt, Artificial Sequence
  Synthetic
ccauugugucguaaagaaa

SEQ ID NO: 7182 - RNA, 19 nt, Artificial Sequence
  Synthetic
gaaagaaggagauacagua

SEQ ID NO: 7183 - RNA, 19 nt, Artificial Sequence
  Synthetic
aggagauacaguaggauuu

SEQ ID NO: 7184 - RNA, 19 nt, Artificial Sequence
  Synthetic
ccgagaugacaguggaaca

SEQ ID NO: 7185 - RNA, 19 nt, Artificial Sequence
  Synthetic
gcaaauuccucaaucauga

SEQ ID NO: 7186 - RNA, 19 nt, Artificial Sequence
  Synthetic
acauuggaguccugggcua

SEQ ID NO: 7187 - RNA, 19 nt, Artificial Sequence
  Synthetic
gaacacaucugcaguccua

SEQ ID NO: 7188 - RNA, 19 nt, Artificial Sequence
  Synthetic
ggaaagaaggagauacagu

SEQ ID NO: 7189 - RNA, 19 nt, Artificial Sequence
  Synthetic
acagcugaccuaugagaaa

SEQ ID NO: 7190 - RNA, 19 nt, Artificial Sequence
  Synthetic
acgaaauggcagaaacaga

SEQ ID NO: 7191 - RNA, 19 nt, Artificial Sequence
  Synthetic
gaucucaccucauggcuua

SEQ ID NO: 7192 - RNA, 19 nt, Artificial Sequence
  Synthetic
acacgaaauggcagaaaca

SEQ ID NO: 7193 - RNA, 19 nt, Artificial Sequence
  Synthetic
gcacuuaucgcacuggaaa

SEQ ID NO: 7194 - RNA, 19 nt, Artificial Sequence
  Synthetic
ggaaaaguuugcacagaca

SEQ ID NO: 7195 - RNA, 19 nt, Artificial Sequence
  Synthetic
uuuacuuagcccaggaaua

SEQ ID NO: 7196 - RNA, 19 nt, Artificial Sequence
  Synthetic
caggaauacuggaauacuu

SEQ ID NO: 7197 - RNA, 19 nt, Artificial Sequence
  Synthetic
aagaugcacuccagaaauu

SEQ ID NO: 7198 - RNA, 19 nt, Artificial Sequence
  Synthetic
ccaccaucuaugaaauuua

SEQ ID NO: 7199 - RNA, 19 nt, Artificial Sequence
  Synthetic
guaucuagaaucagacaga

SEQ ID NO: 7200 - RNA, 19 nt, Artificial Sequence
  Synthetic
uaaagaugcacuccagaaa

SEQ ID NO: 7201 - RNA, 19 nt, Artificial Sequence
  Synthetic
uguugaagcaagucaguau

SEQ ID NO: 7202 - RNA, 19 nt, Artificial Sequence
  Synthetic
cagcuaguuucaugucaua

SEQ ID NO: 7203 - RNA, 19 nt, Artificial Sequence
  Synthetic
ccuuuguugugaugaggua

SEQ ID NO: 7204 - RNA, 19 nt, Artificial Sequence
  Synthetic
aagcaagucuuuucaucua

SEQ ID NO: 7205 - RNA, 19 nt, Artificial Sequence
  Synthetic
agacagaaauccagaauau

SEQ ID NO: 7206 - RNA, 19 nt, Artificial Sequence
  Synthetic
ccacagagcaauagaauuu

SEQ ID NO: 7207 - RNA, 19 nt, Artificial Sequence
  Synthetic
gcacaaaucagucguguua

SEQ ID NO: 7208 - RNA, 19 nt, Artificial Sequence
  Synthetic
cagcagaauuguacagaga

SEQ ID NO: 7209 - RNA, 19 nt, Artificial Sequence
  Synthetic
aagaaggacugguggauga

SEQ ID NO: 7210 - RNA, 19 nt, Artificial Sequence
  Synthetic
gaagaaauguggaacugaa

SEQ ID NO: 7211 - RNA, 19 nt, Artificial Sequence
  Synthetic
auacaaaguucuugagcaa

SEQ ID NO: 7212 - RNA, 19 nt, Artificial Sequence
  Synthetic
caacaaaguuacugugaau

SEQ ID NO: 7213 - RNA, 19 nt, Artificial Sequence
  Synthetic
cagaaaagcuuuauggaaa

SEQ ID NO: 7214 - RNA, 19 nt, Artificial Sequence
  Synthetic
cgacagaaggcuagagaga

SEQ ID NO: 7215 - RNA, 19 nt, Artificial Sequence
  Synthetic
gugaagaggagcagauuua

SEQ ID NO: 7216 - RNA, 19 nt, Artificial Sequence
  Synthetic
cuuagaaacugcugugaaa

SEQ ID NO: 7217 - RNA, 19 nt, Artificial Sequence
  Synthetic
ugaaagacaugcagaacaa

SEQ ID NO: 7218 - RNA, 19 nt, Artificial Sequence
  Synthetic
gugacaauguugagccaaa

SEQ ID NO: 7219 - RNA, 19 nt, Artificial Sequence
  Synthetic
gaguauaaucccuggagaa

SEQ ID NO: 7220 - RNA, 19 nt, Artificial Sequence
  Synthetic
cagaagaaauauagagacu

SEQ ID NO: 7221 - RNA, 19 nt, Artificial Sequence
  Synthetic
cagauuuacccuugggaua

SEQ ID NO: 7222 - RNA, 19 nt, Artificial Sequence
  Synthetic
acgcaucauugaagagaua

SEQ ID NO: 7223 - RNA, 19 nt, Artificial Sequence
  Synthetic
ggacaaagaagaaaggcga

SEQ ID NO: 7224 - RNA, 19 nt, Artificial Sequence
  Synthetic
cucaagagguucagcuaua

SEQ ID NO: 7225 - RNA, 19 nt, Artificial Sequence
  Synthetic
gcugggauaugaagaauaa

SEQ ID NO: 7226 - RNA, 19 nt, Artificial Sequence
  Synthetic
cagcguuauuuuaaggaua

SEQ ID NO: 7227 - RNA, 19 nt, Artificial Sequence
  Synthetic
ggcaaaaggucuuguuuaa

SEQ ID NO: 7228 - RNA, 19 nt, Artificial Sequence
  Synthetic
ggaucuuaggcgaggcaaa

SEQ ID NO: 7229 - RNA, 19 nt, Artificial Sequence
  Synthetic
guagauagcugcuguuaau

SEQ ID NO: 7230 - RNA, 19 nt, Artificial Sequence
  Synthetic
ggaaggagguguuuaugua

SEQ ID NO: 7231 - RNA, 19 nt, Artificial Sequence
  Synthetic
gaacuguggugcaggaaca

SEQ ID NO: 7232 - RNA, 19 nt, Artificial Sequence
  Synthetic
agaaauugcuugcggaguu

SEQ ID NO: 7233 - RNA, 19 nt, Artificial Sequence
  Synthetic
agaucgaccuacuggauua

SEQ ID NO: 7234 - RNA, 19 nt, Artificial Sequence
  Synthetic
aguuaaaugcagcgaagaa

SEQ ID NO: 7235 - RNA, 19 nt, Artificial Sequence
  Synthetic
gagagaggcagcagaaauu

SEQ ID NO: 7236 - RNA, 19 nt, Artificial Sequence
  Synthetic
acaaaguucuugagcaaca

SEQ ID NO: 7237 - RNA, 19 nt, Artificial Sequence
  Synthetic
caacaaugcauaucagcua

SEQ ID NO: 7238 - RNA, 19 nt, Artificial Sequence
  Synthetic
uggauuaguuguacuguua

SEQ ID NO: 7239 - RNA, 19 nt, Artificial Sequence
  Synthetic
ucauaaaggaaguggagga

SEQ ID NO: 7240 - RNA, 19 nt, Artificial Sequence
  Synthetic
guuuaaagcuuugcugaaa

SEQ ID NO: 7241 - RNA, 19 nt, Artificial Sequence
  Synthetic
ugaugaauguggagaguaa

SEQ ID NO: 7242 - RNA, 19 nt, Artificial Sequence
  Synthetic
caagaaauguguagaagaa

SEQ ID NO: 7243 - RNA, 19 nt, Artificial Sequence
  Synthetic
guaccagaauccagagaaa

SEQ ID NO: 7244 - RNA, 19 nt, Artificial Sequence
  Synthetic
ggaaaugauuauagccaau

SEQ ID NO: 7245 - RNA, 19 nt, Artificial Sequence
  Synthetic
gaagagauauuccgagaaa

SEQ ID NO: 7246 - RNA, 19 nt, Artificial Sequence
  Synthetic
accaacagaucgagaguua

SEQ ID NO: 7247 - RNA, 19 nt, Artificial Sequence
  Synthetic
acacaagagaagagauauu

SEQ ID NO: 7248 - RNA, 19 nt, Artificial Sequence
  Synthetic
uuacacaagagaagagaua

SEQ ID NO: 7249 - RNA, 19 nt, Artificial Sequence
  Synthetic
gcaagaugugccugaauaa

SEQ ID NO: 7250 - RNA, 19 nt, Artificial Sequence
  Synthetic
gcgauuagaucuucagaga

SEQ ID NO: 7251 - RNA, 19 nt, Artificial Sequence
  Synthetic
gagaagagauauuccgaga

SEQ ID NO: 7252 - RNA, 19 nt, Artificial Sequence
  Synthetic
agugagagggagagaauau

SEQ ID NO: 7253 - RNA, 19 nt, Artificial Sequence
  Synthetic
gcacacagccacagcagua

SEQ ID NO: 7254 - RNA, 19 nt, Artificial Sequence
  Synthetic
ugaauaaacuccaccgcaa

SEQ ID NO: 7255 - RNA, 19 nt, Artificial Sequence
  Synthetic
cuugaagguagcugggaaa

SEQ ID NO: 7256 - RNA, 19 nt, Artificial Sequence
  Synthetic
ugggaaauacaaaggaaau

SEQ ID NO: 7257 - RNA, 19 nt, Artificial Sequence
  Synthetic
cagcagggaguguggaaau

SEQ ID NO: 7258 - RNA, 19 nt, Artificial Sequence
  Synthetic
ggaaauaauggcccagcua

SEQ ID NO: 7259 - RNA, 19 nt, Artificial Sequence
  Synthetic
agaugaaggugcaguggau

SEQ ID NO: 7260 - RNA, 19 nt, Artificial Sequence
  Synthetic
aggaaaugauuauagccaa

SEQ ID NO: 7261 - RNA, 19 nt, Artificial Sequence
  Synthetic
gcuuauuccgcgagggaca

SEQ ID NO: 7262 - RNA, 19 nt, Artificial Sequence
  Synthetic
ccaagaaauguguagaaga

SEQ ID NO: 7263 - RNA, 19 nt, Artificial Sequence
  Synthetic
ucaacuaguagaagaagaa

SEQ ID NO: 7264 - RNA, 19 nt, Artificial Sequence
  Synthetic
gaaugagggaccagcgauu

SEQ ID NO: 7265 - RNA, 19 nt, Artificial Sequence
  Synthetic
caauugaaccaucagauua

SEQ ID NO: 7266 - RNA, 19 nt, Artificial Sequence
  Synthetic
cacaaagcauuaugaggaa

SEQ ID NO: 7267 - RNA, 19 nt, Artificial Sequence
  Synthetic
uugaagacacaaagcauua

SEQ ID NO: 7268 - RNA, 19 nt, Artificial Sequence
  Synthetic
gaacacgggaacugaguau

SEQ ID NO: 7269 - RNA, 19 nt, Artificial Sequence
  Synthetic
cccuauacccauugagauu

SEQ ID NO: 7270 - RNA, 19 nt, Artificial Sequence
  Synthetic
cugggaaauacaaaggaaa

SEQ ID NO: 7271 - RNA, 19 nt, Artificial Sequence
  Synthetic
ccucaauccaccagaacca

SEQ ID NO: 7272 - RNA, 19 nt, Artificial Sequence
  Synthetic
gggucauccugcugccaau

SEQ ID NO: 7273 - RNA, 19 nt, Artificial Sequence
  Synthetic
caagggaggcugugguucu

SEQ ID NO: 7274 - RNA, 19 nt, Artificial Sequence
  Synthetic
gcugugucccugugugcua

SEQ ID NO: 7275 - RNA, 19 nt, Artificial Sequence
  Synthetic
gggaggcugugguucuugu

SEQ ID NO: 7276 - RNA, 19 nt, Artificial Sequence
  Synthetic
aagggaggcugugguucuu

SEQ ID NO: 7277 - RNA, 19 nt, Artificial Sequence
  Synthetic
gcugcaagcccugcuguug

SEQ ID NO: 7278 - RNA, 19 nt, Artificial Sequence
  Synthetic
gcccugcuguugcucuuca

SEQ ID NO: 7279 - RNA, 19 nt, Artificial Sequence
  Synthetic
gcugugcacccgucuacug

SEQ ID NO: 7280 - RNA, 19 nt, Artificial Sequence
  Synthetic
guguagagccagaggggaa

SEQ ID NO: 7281 - RNA, 19 nt, Artificial Sequence
  Synthetic
gaucuuagcuggaacgcca

SEQ ID NO: 7282 - RNA, 19 nt, Artificial Sequence
  Synthetic
ccagacaagcagagaacca

SEQ ID NO: 7283 - RNA, 19 nt, Artificial Sequence
  Synthetic
cagccauuguguagagcca

SEQ ID NO: 7284 - RNA, 19 nt, Artificial Sequence
  Synthetic
ugucaagugucaauaauca

SEQ ID NO: 7285 - RNA, 19 nt, Artificial Sequence
  Synthetic
aucugaagcucaaagggaa

SEQ ID NO: 7286 - RNA, 19 nt, Artificial Sequence
  Synthetic
cuucaagcccugugaguac

SEQ ID NO: 7287 - RNA, 19 nt, Artificial Sequence
  Synthetic
uggagauggaggacucaaa

SEQ ID NO: 7288 - RNA, 19 nt, Artificial Sequence
  Synthetic
guuugugguaggugcgauu

SEQ ID NO: 7289 - RNA, 19 nt, Artificial Sequence
  Synthetic
uccugaugcugcagaacaa

SEQ ID NO: 7290 - RNA, 19 nt, Artificial Sequence
  Synthetic
ggauccuggaggugccuua

SEQ ID NO: 7291 - RNA, 19 nt, Artificial Sequence
  Synthetic
ggggagaaauacaggauca

SEQ ID NO: 7292 - RNA, 19 nt, Artificial Sequence
  Synthetic
caacaguccuggggagaaa

SEQ ID NO: 7293 - RNA, 19 nt, Artificial Sequence
  Synthetic
ggaagaggaggaaaagaaa

SEQ ID NO: 7294 - RNA, 19 nt, Artificial Sequence
  Synthetic
uggaagaggaggaaaagaa

SEQ ID NO: 7295 - RNA, 19 nt, Artificial Sequence
  Synthetic
gcacagcacuggaagagga

SEQ ID NO: 7296 - RNA, 19 nt, Artificial Sequence
  Synthetic
agaaagaucugccagcauu

SEQ ID NO: 7297 - RNA, 19 nt, Artificial Sequence
  Synthetic
gggagaaauacaggaucaa

SEQ ID NO: 7298 - RNA, 19 nt, Artificial Sequence
  Synthetic
cggagcagguauaucaauu

SEQ ID NO: 7299 - RNA, 19 nt, Artificial Sequence
  Synthetic
gagaaagaucugccagcau

SEQ ID NO: 7300 - RNA, 19 nt, Artificial Sequence
  Synthetic
aggcaccagcacagaguua

SEQ ID NO: 7301 - RNA, 19 nt, Artificial Sequence
  Synthetic
cacuggaagaggaggaaaa

SEQ ID NO: 7302 - RNA, 19 nt, Artificial Sequence
  Synthetic
cuacaaccuaagucauaaa

SEQ ID NO: 7303 - RNA, 19 nt, Artificial Sequence
  Synthetic
aagcagacgucgccacuau

SEQ ID NO: 7304 - RNA, 19 nt, Artificial Sequence
  Synthetic
ccgcauuugugcaggccca

SEQ ID NO: 7305 - RNA, 19 nt, Artificial Sequence
  Synthetic
caucagagaccaccaccaa

SEQ ID NO: 7306 - RNA, 19 nt, Artificial Sequence
  Synthetic
gcacaguacugcacagcac

SEQ ID NO: 7307 - RNA, 19 nt, Artificial Sequence
  Synthetic
cccuacaaccuaagucaua

SEQ ID NO: 7308 - RNA, 19 nt, Artificial Sequence
  Synthetic
cagcacuggaagaggagga

SEQ ID NO: 7309 - RNA, 19 nt, Artificial Sequence
  Synthetic
gcacaucggccuggaccaa

SEQ ID NO: 7310 - RNA, 19 nt, Artificial Sequence
  Synthetic
ccuuuagccagcagcggaa

SEQ ID NO: 7311 - RNA, 19 nt, Artificial Sequence
  Synthetic
gagcagguauaucaauuuu

SEQ ID NO: 7312 - RNA, 19 nt, Artificial Sequence
  Synthetic
gcugugcaucggaggagua

SEQ ID NO: 7313 - RNA, 19 nt, Artificial Sequence
  Synthetic
gcuccauucuccagucaga

SEQ ID NO: 7314 - RNA, 19 nt, Artificial Sequence
  Synthetic
ggagcagguauaucaauuu

SEQ ID NO: 7315 - RNA, 19 nt, Artificial Sequence
  Synthetic
ccuacaaccuaagucauaa

SEQ ID NO: 7316 - RNA, 19 nt, Artificial Sequence
  Synthetic
acacugcaauggagaccuu

SEQ ID NO: 7317 - RNA, 19 nt, Artificial Sequence
  Synthetic
cgcaucaugugucggcuaa

SEQ ID NO: 7318 - RNA, 19 nt, Artificial Sequence
  Synthetic
agaaauacaggaucaagca

SEQ ID NO: 7319 - RNA, 19 nt, Artificial Sequence
  Synthetic
ggaugauggcuucuuccua

SEQ ID NO: 7320 - RNA, 19 nt, Artificial Sequence
  Synthetic
ggucagacucggaaucuug

SEQ ID NO: 7321 - RNA, 19 nt, Artificial Sequence
  Synthetic
cagacaaacaugaggauaa

SEQ ID NO: 7322 - RNA, 19 nt, Artificial Sequence
  Synthetic
ccaaagaaaucaauggaau

SEQ ID NO: 7323 - RNA, 19 nt, Artificial Sequence
  Synthetic
ucuaagacguuuaaggaaa

SEQ ID NO: 7324 - RNA, 19 nt, Artificial Sequence
  Synthetic
aggaauaaauccagaucua

SEQ ID NO: 7325 - RNA, 19 nt, Artificial Sequence
  Synthetic
gcaauaacauucugggcaa

SEQ ID NO: 7326 - RNA, 19 nt, Artificial Sequence
  Synthetic
cagaaauguugcuaaguaa

SEQ ID NO: 7327 - RNA, 19 nt, Artificial Sequence
  Synthetic
gagcagaauuggagaggca

SEQ ID NO: 7328 - RNA, 19 nt, Artificial Sequence
  Synthetic
cauucaagaugcaggauua

SEQ ID NO: 7329 - RNA, 19 nt, Artificial Sequence
  Synthetic
cuacugaacuggaugauua

SEQ ID NO: 7330 - RNA, 19 nt, Artificial Sequence
  Synthetic
gaaagaagccgcaggauca

SEQ ID NO: 7331 - RNA, 19 nt, Artificial Sequence
  Synthetic
gaugauuacuccacaaaua

SEQ ID NO: 7332 - RNA, 19 nt, Artificial Sequence
  Synthetic
aggaagagcaagagcaaaa

SEQ ID NO: 7333 - RNA, 19 nt, Artificial Sequence
  Synthetic
gggccaaacaggaggcaga

SEQ ID NO: 7334 - RNA, 19 nt, Artificial Sequence
  Synthetic
gcgugaagguuuugaaagu

SEQ ID NO: 7335 - RNA, 19 nt, Artificial Sequence
  Synthetic
gcagagauagagcgggaaa

SEQ ID NO: 7336 - RNA, 19 nt, Artificial Sequence
  Synthetic
ggaauuuacaacucagaaa

SEQ ID NO: 7337 - RNA, 19 nt, Artificial Sequence
  Synthetic
ugagaaucuuuuaggacaa

SEQ ID NO: 7338 - RNA, 19 nt, Artificial Sequence
  Synthetic
aggcaguaacagagaagaa

SEQ ID NO: 7339 - RNA, 19 nt, Artificial Sequence
  Synthetic
cuugagaagucuaagagaa

SEQ ID NO: 7340 - RNA, 19 nt, Artificial Sequence
  Synthetic
gcuuaaaccuggcgucauu

SEQ ID NO: 7341 - RNA, 19 nt, Artificial Sequence
  Synthetic
ggaguaaguccaugaguga

SEQ ID NO: 7342 - RNA, 19 nt, Artificial Sequence
  Synthetic
ucaagaaacuggacaccua

SEQ ID NO: 7343 - RNA, 19 nt, Artificial Sequence
  Synthetic
aggcagagauagagcggga

SEQ ID NO: 7344 - RNA, 19 nt, Artificial Sequence
  Synthetic
caacagugagcuuagaaua

SEQ ID NO: 7345 - RNA, 19 nt, Artificial Sequence
  Synthetic
caggaaaugaggaagagaa

SEQ ID NO: 7346 - RNA, 19 nt, Artificial Sequence
  Synthetic
ccagaaauguugcuaagua

SEQ ID NO: 7347 - RNA, 19 nt, Artificial Sequence
  Synthetic
gaugaugcuuggaaguaua

SEQ ID NO: 7348 - RNA, 19 nt, Artificial Sequence
  Synthetic
agaagagagagaagaaauu

SEQ ID NO: 7349 - RNA, 19 nt, Artificial Sequence
  Synthetic
gaggauaacagaagaaguu

SEQ ID NO: 7350 - RNA, 19 nt, Artificial Sequence
  Synthetic
gcaaguuaccagagugaga

SEQ ID NO: 7351 - RNA, 19 nt, Artificial Sequence
  Synthetic
ggaaggugauccugggaga

SEQ ID NO: 7352 - RNA, 19 nt, Artificial Sequence
  Synthetic
aggagaaagcgcuggagaa

SEQ ID NO: 7353 - RNA, 19 nt, Artificial Sequence
  Synthetic
uggaagaagaagaggagga

SEQ ID NO: 7354 - RNA, 19 nt, Artificial Sequence
  Synthetic
aagaagaggaggaggagga

SEQ ID NO: 7355 - RNA, 19 nt, Artificial Sequence
  Synthetic
aagaagaagaggaggagga

SEQ ID NO: 7356 - RNA, 19 nt, Artificial Sequence
  Synthetic
cgcaaaggccggaugggua

SEQ ID NO: 7357 - RNA, 19 nt, Artificial Sequence
  Synthetic
ccccaaagagcgaggacaa

SEQ ID NO: 7358 - RNA, 19 nt, Artificial Sequence
  Synthetic
ccgagagagaagagaaagu

SEQ ID NO: 7359 - RNA, 19 nt, Artificial Sequence
  Synthetic
aggacgaggaggaggacga

SEQ ID NO: 7360 - RNA, 19 nt, Artificial Sequence
  Synthetic
aggacgaggacgaggacga

SEQ ID NO: 7361 - RNA, 19 nt, Artificial Sequence
  Synthetic
gagaagagaaagugcugga

SEQ ID NO: 7362 - RNA, 19 nt, Artificial Sequence
  Synthetic
aggacgaggacgaggagga

SEQ ID NO: 7363 - RNA, 19 nt, Artificial Sequence
  Synthetic
aguccugggcaacgggaaa

SEQ ID NO: 7364 - RNA, 19 nt, Artificial Sequence
  Synthetic
agagaaagugcuggagaau

SEQ ID NO: 7365 - RNA, 19 nt, Artificial Sequence
  Synthetic
gaagagaaagugcuggaga

SEQ ID NO: 7366 - RNA, 19 nt, Artificial Sequence
  Synthetic
ggguggaagaagaagagga

SEQ ID NO: 7367 - RNA, 19 nt, Artificial Sequence
  Synthetic
acuacaaggaggacuacua

SEQ ID NO: 7368 - RNA, 19 nt, Artificial Sequence
  Synthetic
cuggagaggaagcgcaaga

SEQ ID NO: 7369 - RNA, 19 nt, Artificial Sequence
  Synthetic
ccgaaagguccgagagaca

SEQ ID NO: 7370 - RNA, 19 nt, Artificial Sequence
  Synthetic
gagcaaagaugaagaagcu

SEQ ID NO: 7371 - RNA, 19 nt, Artificial Sequence
  Synthetic
uuucagaaccaaagagcaa

SEQ ID NO: 7372 - RNA, 19 nt, Artificial Sequence
  Synthetic
ccgugaagagcgaggauga

SEQ ID NO: 7373 - RNA, 19 nt, Artificial Sequence
  Synthetic
gugacuacgagaaggagaa

SEQ ID NO: 7374 - RNA, 19 nt, Artificial Sequence
  Synthetic
gcaaacaagacuaccaaca

SEQ ID NO: 7375 - RNA, 19 nt, Artificial Sequence
  Synthetic
accaaagagcaaagaugaa

SEQ ID NO: 7376 - RNA, 19 nt, Artificial Sequence
  Synthetic
cgucgaagccuugccgaaa

SEQ ID NO: 7377 - RNA, 19 nt, Artificial Sequence
  Synthetic
gaaccaaagagcaaagaug

SEQ ID NO: 7378 - RNA, 19 nt, Artificial Sequence
  Synthetic
gcggcugcauggagaagau

SEQ ID NO: 7379 - RNA, 19 nt, Artificial Sequence
  Synthetic
acuacgagaaggagaagga

SEQ ID NO: 7380 - RNA, 19 nt, Artificial Sequence
  Synthetic
caaagagcaaagaugaaga

SEQ ID NO: 7381 - RNA, 19 nt, Artificial Sequence
  Synthetic
gcaagggugacuacgagaa

SEQ ID NO: 7382 - RNA, 19 nt, Artificial Sequence
  Synthetic
ugaagagcgaggaugaaga

SEQ ID NO: 7383 - RNA, 19 nt, Artificial Sequence
  Synthetic
agaucguggccauggaaca

SEQ ID NO: 7384 - RNA, 19 nt, Artificial Sequence
  Synthetic
gaaacuguacugcaaacaa

SEQ ID NO: 7385 - RNA, 19 nt, Artificial Sequence
  Synthetic
aaagagcaaagaugaagaa

SEQ ID NO: 7386 - RNA, 19 nt, Artificial Sequence
  Synthetic
aaccaaagagcaaagauga

SEQ ID NO: 7387 - RNA, 19 nt, Artificial Sequence
  Synthetic
cgacagcgauaccuccuua

SEQ ID NO: 7388 - RNA, 19 nt, Artificial Sequence
  Synthetic
acgcaagggcgacgaauuc

SEQ ID NO: 7389 - RNA, 19 nt, Artificial Sequence
  Synthetic
gaagagcgaggaugaagau

SEQ ID NO: 7390 - RNA, 19 nt, Artificial Sequence
  Synthetic
agcgauaccuccuuaacca

SEQ ID NO: 7391 - RNA, 19 nt, Artificial Sequence
  Synthetic
aaacuguacugcaaacaag

SEQ ID NO: 7392 - RNA, 19 nt, Artificial Sequence
  Synthetic
ccaaagagcaaagaugaag

SEQ ID NO: 7393 - RNA, 19 nt, Artificial Sequence
  Synthetic
ggaugaagauggggacaug

SEQ ID NO: 7394 - RNA, 19 nt, Artificial Sequence
  Synthetic
gcagaucguggccauggaa

SEQ ID NO: 7395 - RNA, 19 nt, Artificial Sequence
  Synthetic
caagggugacuacgagaag

SEQ ID NO: 7396 - RNA, 19 nt, Artificial Sequence
  Synthetic
caaacaagacuaccaacag

SEQ ID NO: 7397 - RNA, 19 nt, Artificial Sequence
  Synthetic
guacugcaaacaagacuac

SEQ ID NO: 7398 - RNA, 19 nt, Artificial Sequence
  Synthetic
acgacuccaucuuccauga

SEQ ID NO: 7399 - RNA, 19 nt, Artificial Sequence
  Synthetic
aagcagagauggaagaaua

SEQ ID NO: 7400 - RNA, 19 nt, Artificial Sequence
  Synthetic
gaauaaaacuggugcgcaa

SEQ ID NO: 7401 - RNA, 19 nt, Artificial Sequence
  Synthetic
ggagaaugaccguguguua

SEQ ID NO: 7402 - RNA, 19 nt, Artificial Sequence
  Synthetic
gaaagaacuuaaaggaaga

SEQ ID NO: 7403 - RNA, 19 nt, Artificial Sequence
  Synthetic
gaaacuacacuauggguaa

SEQ ID NO: 7404 - RNA, 19 nt, Artificial Sequence
  Synthetic
acaaauaggcuaagaaguu

SEQ ID NO: 7405 - RNA, 19 nt, Artificial Sequence
  Synthetic
uggcaagacugcugaaaga

SEQ ID NO: 7406 - RNA, 19 nt, Artificial Sequence
  Synthetic
uguaggagguuaugaagaa

SEQ ID NO: 7407 - RNA, 19 nt, Artificial Sequence
  Synthetic
gcuaagaaguugaaacacu

SEQ ID NO: 7408 - RNA, 19 nt, Artificial Sequence
  Synthetic
ucacauagagaaugggauu

SEQ ID NO: 7409 - RNA, 19 nt, Artificial Sequence
  Synthetic
ucacagcaguaaugauaaa

SEQ ID NO: 7410 - RNA, 19 nt, Artificial Sequence
  Synthetic
augagaaggugguaaauau

SEQ ID NO: 7411 - RNA, 19 nt, Artificial Sequence
  Synthetic
cuaagaaguugaaacacua

SEQ ID NO: 7412 - RNA, 19 nt, Artificial Sequence
  Synthetic
ggagugaggcaguggcauu

SEQ ID NO: 7413 - RNA, 19 nt, Artificial Sequence
  Synthetic
agagagugguguuugauua

SEQ ID NO: 7414 - RNA, 19 nt, Artificial Sequence
  Synthetic
cugaaagaacuuaaaggaa

SEQ ID NO: 7415 - RNA, 19 nt, Artificial Sequence
  Synthetic
agaauuagauguggugaua

SEQ ID NO: 7416 - RNA, 19 nt, Artificial Sequence
  Synthetic
cgaguagaucccagugaaa

SEQ ID NO: 7417 - RNA, 19 nt, Artificial Sequence
  Synthetic
cgauaguacucaaagcuuu

SEQ ID NO: 7418 - RNA, 19 nt, Artificial Sequence
  Synthetic
cgauauggcagcccagaaa

SEQ ID NO: 7419 - RNA, 19 nt, Artificial Sequence
  Synthetic
ugucaaugguagaaguaca

SEQ ID NO: 7420 - RNA, 19 nt, Artificial Sequence
  Synthetic
agucauaagcagagaugga

SEQ ID NO: 7421 - RNA, 19 nt, Artificial Sequence
  Synthetic
gguagaaguacaucaggaa

SEQ ID NO: 7422 - RNA, 19 nt, Artificial Sequence
  Synthetic
ggucaugaggcgauuuaaa

SEQ ID NO: 7423 - RNA, 19 nt, Artificial Sequence
  Synthetic
gauuccagauggugaaauu

SEQ ID NO: 7424 - RNA, 19 nt, Artificial Sequence
  Synthetic
ugaaagaacuuaaaggaag

SEQ ID NO: 7425 - RNA, 19 nt, Artificial Sequence
  Synthetic
agaaauggcuaaagcucuu

SEQ ID NO: 7426 - RNA, 19 nt, Artificial Sequence
  Synthetic
uaacacagcucuuuagauu

SEQ ID NO: 7427 - RNA, 19 nt, Artificial Sequence
  Synthetic
cugcauuguaggagguuau

SEQ ID NO: 7428 - RNA, 19 nt, Artificial Sequence
  Synthetic
cagaacaagauuuaaggua

SEQ ID NO: 7429 - RNA, 19 nt, Artificial Sequence
  Synthetic
cagcacuggacaagagaaa

SEQ ID NO: 7430 - RNA, 19 nt, Artificial Sequence
  Synthetic
cauuagagaagcaggaaau

SEQ ID NO: 7431 - RNA, 19 nt, Artificial Sequence
  Synthetic
cauuuuaaguugugcaaga

SEQ ID NO: 7432 - RNA, 19 nt, Artificial Sequence
  Synthetic
gcuacaagugccucagaaa

SEQ ID NO: 7433 - RNA, 19 nt, Artificial Sequence
  Synthetic
uguugaaggagcagaggaa

SEQ ID NO: 7434 - RNA, 19 nt, Artificial Sequence
  Synthetic
cagaauaaagagaggugau

SEQ ID NO: 7435 - RNA, 19 nt, Artificial Sequence
  Synthetic
gcauuaaauuggugcgaag

SEQ ID NO: 7436 - RNA, 19 nt, Artificial Sequence
  Synthetic
gcagaaggccuuaaagaaa

SEQ ID NO: 7437 - RNA, 19 nt, Artificial Sequence
  Synthetic
gguagugaggauagagaaa

SEQ ID NO: 7438 - RNA, 19 nt, Artificial Sequence
  Synthetic
cagucaaagaagaggagaa

SEQ ID NO: 7439 - RNA, 19 nt, Artificial Sequence
  Synthetic
cgacaggagcggaagagaa

SEQ ID NO: 7440 - RNA, 19 nt, Artificial Sequence
  Synthetic
gcugagaacacauggacua

SEQ ID NO: 7441 - RNA, 19 nt, Artificial Sequence
  Synthetic
agaaaugccuggaguugaa

SEQ ID NO: 7442 - RNA, 19 nt, Artificial Sequence
  Synthetic
aagaagaggagaagcagaa

SEQ ID NO: 7443 - RNA, 19 nt, Artificial Sequence
  Synthetic
ccacggaacauuuggaaga

SEQ ID NO: 7444 - RNA, 19 nt, Artificial Sequence
  Synthetic
cuguuuaacuugaaagaca

SEQ ID NO: 7445 - RNA, 19 nt, Artificial Sequence
  Synthetic
ucaaagaagaggagaagca

SEQ ID NO: 7446 - RNA, 19 nt, Artificial Sequence
  Synthetic
uggaagagccgauaaguau

SEQ ID NO: 7447 - RNA, 19 nt, Artificial Sequence
  Synthetic
gcaaggagcggcagugcua

SEQ ID NO: 7448 - RNA, 19 nt, Artificial Sequence
  Synthetic
gcggauggauugaguuaca

SEQ ID NO: 7449 - RNA, 19 nt, Artificial Sequence
  Synthetic
gugcagacacuaugccaaa

SEQ ID NO: 7450 - RNA, 19 nt, Artificial Sequence
  Synthetic
ccacaagacagucaaagaa

SEQ ID NO: 7451 - RNA, 19 nt, Artificial Sequence
  Synthetic
cgggagaaacugugcugua

SEQ ID NO: 7452 - RNA, 19 nt, Artificial Sequence
  Synthetic
uaaagaaagacgagggugu

SEQ ID NO: 7453 - RNA, 19 nt, Artificial Sequence
  Synthetic
ggauugaguuacauguuuu

SEQ ID NO: 7454 - RNA, 19 nt, Artificial Sequence
  Synthetic
acgaauugcagcuguuuaa

SEQ ID NO: 7455 - RNA, 19 nt, Artificial Sequence
  Synthetic
gaaacugugcuguaugaua

SEQ ID NO: 7456 - RNA, 19 nt, Artificial Sequence
  Synthetic
gguaguggaucuagguagu

SEQ ID NO: 7457 - RNA, 19 nt, Artificial Sequence
  Synthetic
gucaguauuauuaggguua

SEQ ID NO: 7458 - RNA, 19 nt, Artificial Sequence
  Synthetic
gccgaugugucuugagauu

SEQ ID NO: 7459 - RNA, 19 nt, Artificial Sequence
  Synthetic
caggagcggaagagaagaa

SEQ ID NO: 7460 - RNA, 19 nt, Artificial Sequence
  Synthetic
gggccaaagugagcgcaaa

SEQ ID NO: 7461 - RNA, 19 nt, Artificial Sequence
  Synthetic
cagcagaaggccuuaaaga

SEQ ID NO: 7462 - RNA, 19 nt, Artificial Sequence
  Synthetic
gagaaacugugcuguauga

SEQ ID NO: 7463 - RNA, 19 nt, Artificial Sequence
  Synthetic
gcggaagagaagaagcaca

SEQ ID NO: 7464 - RNA, 19 nt, Artificial Sequence
  Synthetic
gcaagcgacaggagcggaa

SEQ ID NO: 7465 - RNA, 19 nt, Artificial Sequence
  Synthetic
gagaagaagcacagccaac

SEQ ID NO: 7466 - RNA, 19 nt, Artificial Sequence
  Synthetic
gagcaagcuaguagaaaua

SEQ ID NO: 7467 - RNA, 19 nt, Artificial Sequence
  Synthetic
ggagcaagcuaguagaaau

SEQ ID NO: 7468 - RNA, 19 nt, Artificial Sequence
  Synthetic
guauaaaucacauggguau

SEQ ID NO: 7469 - RNA, 19 nt, Artificial Sequence
  Synthetic
caucaggcuuggaggagaa

SEQ ID NO: 7470 - RNA, 19 nt, Artificial Sequence
  Synthetic
agaugaaggugaaggacuu

SEQ ID NO: 7471 - RNA, 19 nt, Artificial Sequence
  Synthetic
cgaaaugugccgggagaaa

SEQ ID NO: 7472 - RNA, 19 nt, Artificial Sequence
  Synthetic
gugaaggacuugagggacu

SEQ ID NO: 7473 - RNA, 19 nt, Artificial Sequence
  Synthetic
gagaggagcucaugaagau

SEQ ID NO: 7474 - RNA, 19 nt, Artificial Sequence
  Synthetic
gaggagaaccuguguaaga

SEQ ID NO: 7475 - RNA, 19 nt, Artificial Sequence
  Synthetic
ggugagaaaugaaauacaa

SEQ ID NO: 7476 - RNA, 19 nt, Artificial Sequence
  Synthetic
gcuaaagucucuugcuaca

SEQ ID NO: 7477 - RNA, 19 nt, Artificial Sequence
  Synthetic
ugacugaccuggaggacau

SEQ ID NO: 7478 - RNA, 19 nt, Artificial Sequence
  Synthetic
cagaguaccugcugaggau

SEQ ID NO: 7479 - RNA, 19 nt, Artificial Sequence
  Synthetic
cagcccagguucaggagaa

SEQ ID NO: 7480 - RNA, 19 nt, Artificial Sequence
  Synthetic
cugcuuggacuguaagaaa

SEQ ID NO: 7481 - RNA, 19 nt, Artificial Sequence
  Synthetic
gagcugauggagagaguga

SEQ ID NO: 7482 - RNA, 19 nt, Artificial Sequence
  Synthetic
gagccaggaugcaggccua

SEQ ID NO: 7483 - RNA, 19 nt, Artificial Sequence
  Synthetic
gguaacugaugaacagaga

SEQ ID NO: 7484 - RNA, 19 nt, Artificial Sequence
  Synthetic
caugacaucucuaccgaaa

SEQ ID NO: 7485 - RNA, 19 nt, Artificial Sequence
  Synthetic
uggaggagaaccuguguaa

SEQ ID NO: 7486 - RNA, 19 nt, Artificial Sequence
  Synthetic
gcaagcuaguagaaauauu

SEQ ID NO: 7487 - RNA, 19 nt, Artificial Sequence
  Synthetic
aggagaaucagcaggccaa

SEQ ID NO: 7488 - RNA, 19 nt, Artificial Sequence
  Synthetic
gcacauucggauuuaaauu

SEQ ID NO: 7489 - RNA, 19 nt, Artificial Sequence
  Synthetic
cccugaaccuagacaguuu

SEQ ID NO: 7490 - RNA, 19 nt, Artificial Sequence
  Synthetic
cgagaggagcucaugaaga

SEQ ID NO: 7491 - RNA, 19 nt, Artificial Sequence
  Synthetic
aggugaaggacuugaggga

SEQ ID NO: 7492 - RNA, 19 nt, Artificial Sequence
  Synthetic
gggagcugauggagagagu

SEQ ID NO: 7493 - RNA, 19 nt, Artificial Sequence
  Synthetic
agaccugcuuggacuguaa

SEQ ID NO: 7494 - RNA, 19 nt, Artificial Sequence
  Synthetic
gcucaggguuggccagcuu

SEQ ID NO: 7495 - RNA, 19 nt, Artificial Sequence
  Synthetic
guuucgagcuacagccuuu

SEQ ID NO: 7496 - RNA, 19 nt, Artificial Sequence
  Synthetic
cuuugaaacuguaggacaa

SEQ ID NO: 7497 - RNA, 19 nt, Artificial Sequence
  Synthetic
uauggaaaccugagagaaa

SEQ ID NO: 7498 - RNA, 19 nt, Artificial Sequence
  Synthetic
ggacaagggcuguaagaca

SEQ ID NO: 7499 - RNA, 19 nt, Artificial Sequence
  Synthetic
aaucauggcccgaggacaa

SEQ ID NO: 7500 - RNA, 19 nt, Artificial Sequence
  Synthetic
gugcaagaauauuagacua

SEQ ID NO: 7501 - RNA, 19 nt, Artificial Sequence
  Synthetic
cuuaauauuuggugcaaga

SEQ ID NO: 7502 - RNA, 19 nt, Artificial Sequence
  Synthetic
acuaagagguuuuguugau

SEQ ID NO: 7503 - RNA, 19 nt, Artificial Sequence
  Synthetic
ggucaaacugccuuaauau

SEQ ID NO: 7504 - RNA, 19 nt, Artificial Sequence
  Synthetic
cugauaaacugugggaaca

SEQ ID NO: 7505 - RNA, 19 nt, Artificial Sequence
  Synthetic
guugaugcguggagccauu

SEQ ID NO: 7506 - RNA, 19 nt, Artificial Sequence
  Synthetic
acgauuugcuccugacuau

SEQ ID NO: 7507 - RNA, 19 nt, Artificial Sequence
  Synthetic
gaagauauugccaggcuuu

SEQ ID NO: 7508 - RNA, 19 nt, Artificial Sequence
  Synthetic
aggucaaacugccuuaaua

SEQ ID NO: 7509 - RNA, 19 nt, Artificial Sequence
  Synthetic
caaaagaaacccaugaaga

SEQ ID NO: 7510 - RNA, 19 nt, Artificial Sequence
  Synthetic
gcaaagacuauuaccaguu

SEQ ID NO: 7511 - RNA, 19 nt, Artificial Sequence
  Synthetic
aagcugugcaugucugaua

SEQ ID NO: 7512 - RNA, 19 nt, Artificial Sequence
  Synthetic
caaagacuauuaccaguua

SEQ ID NO: 7513 - RNA, 19 nt, Artificial Sequence
  Synthetic
gagugaguaucgaucaaca

SEQ ID NO: 7514 - RNA, 19 nt, Artificial Sequence
  Synthetic
gugaguaucgaucaacaaa

SEQ ID NO: 7515 - RNA, 19 nt, Artificial Sequence
  Synthetic
ccuagagaauucacaucuu

SEQ ID NO: 7516 - RNA, 19 nt, Artificial Sequence
  Synthetic
gaggacaagggcuguaaga

SEQ ID NO: 7517 - RNA, 19 nt, Artificial Sequence
  Synthetic
uggaagaucucucuaagga

SEQ ID NO: 7518 - RNA, 19 nt, Artificial Sequence
  Synthetic
caucacacagauuugcaaa

SEQ ID NO: 7519 - RNA, 19 nt, Artificial Sequence
  Synthetic
aagaaacccaugaagacuu

SEQ ID NO: 7520 - RNA, 19 nt, Artificial Sequence
  Synthetic
aagacuuccuagagaauuc

SEQ ID NO: 7521 - RNA, 19 nt, Artificial Sequence
  Synthetic
ugucaaacaucacacagau

SEQ ID NO: 7522 - RNA, 19 nt, Artificial Sequence
  Synthetic
guaaauuugacuuccuuga

SEQ ID NO: 7523 - RNA, 19 nt, Artificial Sequence
  Synthetic
ucaaacaucacacagauuu

SEQ ID NO: 7524 - RNA, 19 nt, Artificial Sequence
  Synthetic
ggauggaggggaagggaaa

SEQ ID NO: 7525 - RNA, 19 nt, Artificial Sequence
  Synthetic
ccucaagggucacgcgcua

SEQ ID NO: 7526 - RNA, 19 nt, Artificial Sequence
  Synthetic
ccaagaaggaggacggcuu

SEQ ID NO: 7527 - RNA, 19 nt, Artificial Sequence
  Synthetic
uggugaaaguguuuggaga

SEQ ID NO: 7528 - RNA, 19 nt, Artificial Sequence
  Synthetic
uggagguggcgcuggguaa

SEQ ID NO: 7529 - RNA, 19 nt, Artificial Sequence
  Synthetic
ucgggaagguggugaaagu

SEQ ID NO: 7530 - RNA, 19 nt, Artificial Sequence
  Synthetic
ccaccaacagccaggguuu

SEQ ID NO: 7531 - RNA, 19 nt, Artificial Sequence
  Synthetic
acgcgcuagcugugagaaa

SEQ ID NO: 7532 - RNA, 19 nt, Artificial Sequence
  Synthetic
gcuagaggccagucccaaa

SEQ ID NO: 7533 - RNA, 19 nt, Artificial Sequence
  Synthetic
gcgcuagcugugagaaaga

SEQ ID NO: 7534 - RNA, 19 nt, Artificial Sequence
  Synthetic
gugucaacgccgaggacga

SEQ ID NO: 7535 - RNA, 19 nt, Artificial Sequence
  Synthetic
gggagaugcaggaaggcca

SEQ ID NO: 7536 - RNA, 19 nt, Artificial Sequence
  Synthetic
gcaacacggcacugcacua

SEQ ID NO: 7537 - RNA, 19 nt, Artificial Sequence
  Synthetic
gccagguggucgucagcaa

SEQ ID NO: 7538 - RNA, 19 nt, Artificial Sequence
  Synthetic
ggaagguggugaaaguguu

SEQ ID NO: 7539 - RNA, 19 nt, Artificial Sequence
  Synthetic
ccaggauggcggaguuuau

SEQ ID NO: 7540 - RNA, 19 nt, Artificial Sequence
  Synthetic
gcgaguggacggacgacau

SEQ ID NO: 7541 - RNA, 19 nt, Artificial Sequence
  Synthetic
gcgucgggaagguggugaa

SEQ ID NO: 7542 - RNA, 19 nt, Artificial Sequence
  Synthetic
gggaagguggugaaagugu

SEQ ID NO: 7543 - RNA, 19 nt, Artificial Sequence
  Synthetic
uggcggaguuuaucggaca

SEQ ID NO: 7544 - RNA, 19 nt, Artificial Sequence
  Synthetic
gguggucgucagcaagaaa

SEQ ID NO: 7545 - RNA, 19 nt, Artificial Sequence
  Synthetic
gaagguggugaaaguguuu

SEQ ID NO: 7546 - RNA, 19 nt, Artificial Sequence
  Synthetic
ucacggaggugccaaacau

SEQ ID NO: 7547 - RNA, 19 nt, Artificial Sequence
  Synthetic
ugauacggcugcugcuaca

SEQ ID NO: 7548 - RNA, 19 nt, Artificial Sequence
  Synthetic
cgcacgaccugcugcugua

SEQ ID NO: 7549 - RNA, 19 nt, Artificial Sequence
  Synthetic
gaggccagucccaaaguuu

SEQ ID NO: 7550 - RNA, 19 nt, Artificial Sequence
  Synthetic
caucggcgaccuugacaca

SEQ ID NO: 7551 - RNA, 19 nt, Artificial Sequence
  Synthetic
gacgcugggugcaguguca

SEQ ID NO: 7552 - RNA, 19 nt, Artificial Sequence
  Synthetic
gugugugccuggacuacga

SEQ ID NO: 7553 - RNA, 19 nt, Artificial Sequence
  Synthetic
ucaccaagcaccacuccuu

SEQ ID NO: 7554 - RNA, 19 nt, Artificial Sequence
  Synthetic
ggaaagaggugaaaaggaa

SEQ ID NO: 7555 - RNA, 19 nt, Artificial Sequence
  Synthetic
gaucauggguggcggguau

SEQ ID NO: 7556 - RNA, 19 nt, Artificial Sequence
  Synthetic
caacauaccuuguaaauag

SEQ ID NO: 7557 - RNA, 19 nt, Artificial Sequence
  Synthetic
gccuggaagucaagugcaa

SEQ ID NO: 7558 - RNA, 19 nt, Artificial Sequence
  Synthetic
gggccaacauaccuuguaa

SEQ ID NO: 7559 - RNA, 19 nt, Artificial Sequence
  Synthetic
ccaacauaccuuguaaaua

SEQ ID NO: 7560 - RNA, 19 nt, Artificial Sequence
  Synthetic
gccaacauaccuuguaaau

SEQ ID NO: 7561 - RNA, 19 nt, Artificial Sequence
  Synthetic
gguaugaucucaaccucuu

SEQ ID NO: 7562 - RNA, 19 nt, Artificial Sequence
  Synthetic
gcagagcaccggcagcauu

SEQ ID NO: 7563 - RNA, 19 nt, Artificial Sequence
  Synthetic
ucaagaggccagcaagguu

SEQ ID NO: 7564 - RNA, 19 nt, Artificial Sequence
  Synthetic
aagguuguccacaugaaua

SEQ ID NO: 7565 - RNA, 19 nt, Artificial Sequence
  Synthetic
gacgcuggcugcauaguga

SEQ ID NO: 7566 - RNA, 19 nt, Artificial Sequence
  Synthetic
ugaauaaacuccggaaaac

SEQ ID NO: 7567 - RNA, 19 nt, Artificial Sequence
  Synthetic
uggcggagcucagcaacuu

SEQ ID NO: 7568 - RNA, 19 nt, Artificial Sequence
  Synthetic
ggaagucaagugcaagaac

SEQ ID NO: 7569 - RNA, 19 nt, Artificial Sequence
  Synthetic
ccagugucguucguagaga

SEQ ID NO: 7570 - RNA, 19 nt, Artificial Sequence
  Synthetic
ccaagccaccagugucguu

SEQ ID NO: 7571 - RNA, 19 nt, Artificial Sequence
  Synthetic
cagagcaccggcagcauug

SEQ ID NO: 7572 - RNA, 19 nt, Artificial Sequence
  Synthetic
gggccgugcuggaagacaa

SEQ ID NO: 7573 - RNA, 19 nt, Artificial Sequence
  Synthetic
cagcgaagcgggugaccau

SEQ ID NO: 7574 - RNA, 19 nt, Artificial Sequence
  Synthetic
ggaccuagcagcacacaga

SEQ ID NO: 7575 - RNA, 19 nt, Artificial Sequence
  Synthetic
ucaaagccuugcuggucuu

SEQ ID NO: 7576 - RNA, 19 nt, Artificial Sequence
  Synthetic
gagcaugacccacgucuac

SEQ ID NO: 7577 - RNA, 19 nt, Artificial Sequence
  Synthetic
ccacagaagacagcuuuga

SEQ ID NO: 7578 - RNA, 19 nt, Artificial Sequence
  Synthetic
cgccacagaagacagcuuu

SEQ ID NO: 7579 - RNA, 19 nt, Artificial Sequence
  Synthetic
gaggagggcgaccaacuca

SEQ ID NO: 7580 - RNA, 19 nt, Artificial Sequence
  Synthetic
ggucguaucagccuucuuu

SEQ ID NO: 7581 - RNA, 19 nt, Artificial Sequence
  Synthetic
ccacaccuaccacugcaaa

SEQ ID NO: 7582 - RNA, 19 nt, Artificial Sequence
  Synthetic
gcaugacccacgucuacga

SEQ ID NO: 7583 - RNA, 19 nt, Artificial Sequence
  Synthetic
ugaggccccuggucaguaa

SEQ ID NO: 7584 - RNA, 19 nt, Artificial Sequence
  Synthetic
gagggcgaccaacucaaga

SEQ ID NO: 7585 - RNA, 19 nt, Artificial Sequence
  Synthetic
cgagcucgguggacuuugc

SEQ ID NO: 7586 - RNA, 19 nt, Artificial Sequence
  Synthetic
ggagggcgaccaacucaag

SEQ ID NO: 7587 - RNA, 19 nt, Artificial Sequence
  Synthetic
cguaucagccuucuuuguc

SEQ ID NO: 7588 - RNA, 19 nt, Artificial Sequence
  Synthetic
ccacgucuacgaggacuug

SEQ ID NO: 7589 - RNA, 19 nt, Artificial Sequence
  Synthetic
cuguggaaaucaugagaaa

SEQ ID NO: 7590 - RNA, 19 nt, Artificial Sequence
  Synthetic
gagaagaggcucagcggga

SEQ ID NO: 7591 - RNA, 19 nt, Artificial Sequence
  Synthetic
ggaagaaggcacugaccga

SEQ ID NO: 7592 - RNA, 19 nt, Artificial Sequence
  Synthetic
uggaggaggaggagcauuu

SEQ ID NO: 7593 - RNA, 19 nt, Artificial Sequence
  Synthetic
gugauggaccguaggaaga

SEQ ID NO: 7594 - RNA, 19 nt, Artificial Sequence
  Synthetic
gaccauugcccgaagucaa

SEQ ID NO: 7595 - RNA, 19 nt, Artificial Sequence
  Synthetic
ugcccgaagucaaggcuua

SEQ ID NO: 7596 - RNA, 19 nt, Artificial Sequence
  Synthetic
gaacaaggggucuguggaa

SEQ ID NO: 7597 - RNA, 19 nt, Artificial Sequence
  Synthetic
gccaggagacagcggacaa

SEQ ID NO: 7598 - RNA, 19 nt, Artificial Sequence
  Synthetic
cugcaguguggaagggaca

SEQ ID NO: 7599 - RNA, 19 nt, Artificial Sequence
  Synthetic
ggaagggacacgugaugga

SEQ ID NO: 7600 - RNA, 19 nt, Artificial Sequence
  Synthetic
ggaugagagcagcggagga

SEQ ID NO: 7601 - RNA, 19 nt, Artificial Sequence
  Synthetic
gggccuucuuuguggagga

SEQ ID NO: 7602 - RNA, 19 nt, Artificial Sequence
  Synthetic
uggagaagaagcaucgcaa

SEQ ID NO: 7603 - RNA, 19 nt, Artificial Sequence
  Synthetic
ccuucuuuguggaggagga

SEQ ID NO: 7604 - RNA, 19 nt, Artificial Sequence
  Synthetic
gcacugaccgacuacaaga

SEQ ID NO: 7605 - RNA, 19 nt, Artificial Sequence
  Synthetic
agaaggcacugaccgacua

SEQ ID NO: 7606 - RNA, 19 nt, Artificial Sequence
  Synthetic
ggaggaggaggagcauuuc

SEQ ID NO: 7607 - RNA, 19 nt, Artificial Sequence
  Synthetic
ggagaaaggaggcgaauua

SEQ ID NO: 7608 - RNA, 19 nt, Artificial Sequence
  Synthetic
ccucagaacuggacaagaa

SEQ ID NO: 7609 - RNA, 19 nt, Artificial Sequence
  Synthetic
gcugaaagccaaaggaauu

SEQ ID NO: 7610 - RNA, 19 nt, Artificial Sequence
  Synthetic
ccaaauacuuguugacgaa

SEQ ID NO: 7611 - RNA, 19 nt, Artificial Sequence
  Synthetic
ccaaaggaauugaguaaga

SEQ ID NO: 7612 - RNA, 19 nt, Artificial Sequence
  Synthetic
ugucauuucuggagugaua

SEQ ID NO: 7613 - RNA, 19 nt, Artificial Sequence
  Synthetic
gaaagagggucaugaaaca

SEQ ID NO: 7614 - RNA, 19 nt, Artificial Sequence
  Synthetic
gaacuggacaagaaggaaa

SEQ ID NO: 7615 - RNA, 19 nt, Artificial Sequence
  Synthetic
ccaagacauugaaagaaua

SEQ ID NO: 7616 - RNA, 19 nt, Artificial Sequence
  Synthetic
gagcagagggcauacauaa

SEQ ID NO: 7617 - RNA, 19 nt, Artificial Sequence
  Synthetic
gcaucaacaugaaggacau

SEQ ID NO: 7618 - RNA, 19 nt, Artificial Sequence
  Synthetic
gagaaaagauuugguguaa

SEQ ID NO: 7619 - RNA, 19 nt, Artificial Sequence
  Synthetic
ggaaagagauacccuggaa

SEQ ID NO: 7620 - RNA, 19 nt, Artificial Sequence
  Synthetic
ggacauugauagcgaugau

SEQ ID NO: 7621 - RNA, 19 nt, Artificial Sequence
  Synthetic
uugcaaaggcgaagcagua

SEQ ID NO: 7622 - RNA, 19 nt, Artificial Sequence
  Synthetic
aaagagauacccuggaaua

SEQ ID NO: 7623 - RNA, 19 nt, Artificial Sequence
  Synthetic
ccaaagagcagagggcaua

SEQ ID NO: 7624 - RNA, 19 nt, Artificial Sequence
  Synthetic
gagacuggguaauugauaa

SEQ ID NO: 7625 - RNA, 19 nt, Artificial Sequence
  Synthetic
ccaaagugcuggaauuaca

SEQ ID NO: 7626 - RNA, 19 nt, Artificial Sequence
  Synthetic
ggaagcagcucgugagucu

SEQ ID NO: 7627 - RNA, 19 nt, Artificial Sequence
  Synthetic
gcagaaaucaaaugacaga

SEQ ID NO: 7628 - RNA, 19 nt, Artificial Sequence
  Synthetic
gaacagaaccuuugcaagu

SEQ ID NO: 7629 - RNA, 19 nt, Artificial Sequence
  Synthetic
ggagacaaauaaugaaguu

SEQ ID NO: 7630 - RNA, 19 nt, Artificial Sequence
  Synthetic
ccugaaaccuuaucaccua

SEQ ID NO: 7631 - RNA, 19 nt, Artificial Sequence
  Synthetic
acucauaagccaucuuuaa

SEQ ID NO: 7632 - RNA, 19 nt, Artificial Sequence
  Synthetic
guauuaaaccuguauguga

SEQ ID NO: 7633 - RNA, 19 nt, Artificial Sequence
  Synthetic
gagcaaguguuguuuggau

SEQ ID NO: 7634 - RNA, 19 nt, Artificial Sequence
  Synthetic
ucagaacacauuuggacaa

SEQ ID NO: 7635 - RNA, 19 nt, Artificial Sequence
  Synthetic
guuuguauccugaagauuu

SEQ ID NO: 7636 - RNA, 19 nt, Artificial Sequence
  Synthetic
aaauuaaaguggcaacuga

SEQ ID NO: 7637 - RNA, 19 nt, Artificial Sequence
  Synthetic
cuaaugacauaguucguau

SEQ ID NO: 7638 - RNA, 19 nt, Artificial Sequence
  Synthetic
cgaagaaauuagaggagau

SEQ ID NO: 7639 - RNA, 19 nt, Artificial Sequence
  Synthetic
gagaaguguuggagcaauu

SEQ ID NO: 7640 - RNA, 19 nt, Artificial Sequence
  Synthetic
aguccaaacucuagaucua

SEQ ID NO: 7641 - RNA, 19 nt, Artificial Sequence
  Synthetic
acacgaagcuucuuugaaa

SEQ ID NO: 7642 - RNA, 19 nt, Artificial Sequence
  Synthetic
agaaauuagaggagauuca

SEQ ID NO: 7643 - RNA, 19 nt, Artificial Sequence
  Synthetic
cgauuuagguggcugcuua

SEQ ID NO: 7644 - RNA, 19 nt, Artificial Sequence
  Synthetic
caaacaaacuaaagcaagu

SEQ ID NO: 7645 - RNA, 19 nt, Artificial Sequence
  Synthetic
gaguaugcagggacagaua

SEQ ID NO: 7646 - RNA, 19 nt, Artificial Sequence
  Synthetic
ccuuacaugcauuaggaaa

SEQ ID NO: 7647 - RNA, 19 nt, Artificial Sequence
  Synthetic
gcgaagaaauuagaggaga

SEQ ID NO: 7648 - RNA, 19 nt, Artificial Sequence
  Synthetic
ggaccuugugcgaagaaau

SEQ ID NO: 7649 - RNA, 19 nt, Artificial Sequence
  Synthetic
cauaaaagacagacugauu

SEQ ID NO: 7650 - RNA, 19 nt, Artificial Sequence
  Synthetic
cauaugggacauuguguaa

SEQ ID NO: 7651 - RNA, 19 nt, Artificial Sequence
  Synthetic
ucacagacauuaagccuuu

SEQ ID NO: 7652 - RNA, 19 nt, Artificial Sequence
  Synthetic
gaucuacggagcugcgaua

SEQ ID NO: 7653 - RNA, 19 nt, Artificial Sequence
  Synthetic
auuaguaggcccaaacaaa

SEQ ID NO: 7654 - RNA, 19 nt, Artificial Sequence
  Synthetic
cuuacaugcauuaggaaaa

SEQ ID NO: 7655 - RNA, 19 nt, Artificial Sequence
  Synthetic
caaacuaaagcaagugaca

SEQ ID NO: 7656 - RNA, 19 nt, Artificial Sequence
  Synthetic
gguggcugcuuaaguauua

SEQ ID NO: 7657 - RNA, 19 nt, Artificial Sequence
  Synthetic
ugcuaaagaucaucgauuu

SEQ ID NO: 7658 - RNA, 19 nt, Artificial Sequence
  Synthetic
gaagaaauuagaggagauu

SEQ ID NO: 7659 - RNA, 19 nt, Artificial Sequence
  Synthetic
ccagauaucucacagacau

SEQ ID NO: 7660 - RNA, 19 nt, Artificial Sequence
  Synthetic
gggacagauaacagauuca

SEQ ID NO: 7661 - RNA, 19 nt, Artificial Sequence
  Synthetic
ccgagaaguguuggagcaa

SEQ ID NO: 7662 - RNA, 19 nt, Artificial Sequence
  Synthetic
cgaaggagucguugcucuu

SEQ ID NO: 7663 - RNA, 19 nt, Artificial Sequence
  Synthetic
cugcuaaagaucaucgauu

SEQ ID NO: 7664 - RNA, 19 nt, Artificial Sequence
  Synthetic
cccgagaaguguuggagca

SEQ ID NO: 7665 - RNA, 19 nt, Artificial Sequence
  Synthetic
uaaugaguaugcagggaca

SEQ ID NO: 7666 - RNA, 19 nt, Artificial Sequence
  Synthetic
cugcaaucucacugacgaa

SEQ ID NO: 7667 - RNA, 19 nt, Artificial Sequence
  Synthetic
ucuacggagcugcgauaua

SEQ ID NO: 7668 - RNA, 19 nt, Artificial Sequence
  Synthetic
gcuggaaucugguggacaa

SEQ ID NO: 7669 - RNA, 19 nt, Artificial Sequence
  Synthetic
ggaaucugguggacaauaa

SEQ ID NO: 7670 - RNA, 19 nt, Artificial Sequence
  Synthetic
caacaugccuucagcacua

SEQ ID NO: 7671 - RNA, 19 nt, Artificial Sequence
  Synthetic
ggagaaagaauucgaguca

SEQ ID NO: 7672 - RNA, 19 nt, Artificial Sequence
  Synthetic
ggacaauaaucuacuacau

SEQ ID NO: 7673 - RNA, 19 nt, Artificial Sequence
  Synthetic
gaagaauggcuuuacuuua

SEQ ID NO: 7674 - RNA, 19 nt, Artificial Sequence
  Synthetic
agaaagaauucgagucauc

SEQ ID NO: 7675 - RNA, 19 nt, Artificial Sequence
  Synthetic
gaagauaagacuuuagcuu

SEQ ID NO: 7676 - RNA, 19 nt, Artificial Sequence
  Synthetic
ucagauaggagaaagaauu

SEQ ID NO: 7677 - RNA, 19 nt, Artificial Sequence
  Synthetic
acauaauggagaagucaau

SEQ ID NO: 7678 - RNA, 19 nt, Artificial Sequence
  Synthetic
ucuacuacauaauggagaa

SEQ ID NO: 7679 - RNA, 19 nt, Artificial Sequence
  Synthetic
acauggaagauaagacuuu

SEQ ID NO: 7680 - RNA, 19 nt, Artificial Sequence
  Synthetic
ggacauggaagauaagacu

SEQ ID NO: 7681 - RNA, 19 nt, Artificial Sequence
  Synthetic
caagauacgugcuuuucaa

SEQ ID NO: 7682 - RNA, 19 nt, Artificial Sequence
  Synthetic
gcaacaacgcaccaaaaua

SEQ ID NO: 7683 - RNA, 19 nt, Artificial Sequence
  Synthetic
ccaugcagugccaagguua

SEQ ID NO: 7684 - RNA, 19 nt, Artificial Sequence
  Synthetic
gauacgugcuuuucaacau

SEQ ID NO: 7685 - RNA, 19 nt, Artificial Sequence
  Synthetic
ugauuggaauugccacaaa

SEQ ID NO: 7686 - RNA, 19 nt, Artificial Sequence
  Synthetic
gacuuuagcuuuugaacgu

SEQ ID NO: 7687 - RNA, 19 nt, Artificial Sequence
  Synthetic
uggaguugguguucucuua

SEQ ID NO: 7688 - RNA, 19 nt, Artificial Sequence
  Synthetic
gcuuuacuuuacaucgaaa

SEQ ID NO: 7689 - RNA, 19 nt, Artificial Sequence
  Synthetic
caacaacgcaccaaaauau

SEQ ID NO: 7690 - RNA, 19 nt, Artificial Sequence
  Synthetic
uggcauugcugggcaguga

SEQ ID NO: 7691 - RNA, 19 nt, Artificial Sequence
  Synthetic
agaagaauggcuuuacuuu

SEQ ID NO: 7692 - RNA, 19 nt, Artificial Sequence
  Synthetic
guauauggcaacacagaag

SEQ ID NO: 7693 - RNA, 19 nt, Artificial Sequence
  Synthetic
gagaaagaauucgagucau

SEQ ID NO: 7694 - RNA, 19 nt, Artificial Sequence
  Synthetic
gauuggaauugccacaaaa

SEQ ID NO: 7695 - RNA, 19 nt, Artificial Sequence
  Synthetic
cagauaggagaaagaauuc

SEQ ID NO: 7696 - RNA, 19 nt, Artificial Sequence
  Synthetic
uggcuuuacuuuacaucga

SEQ ID NO: 7697 - RNA, 19 nt, Artificial Sequence
  Synthetic
gauaggagaaagaauucga

SEQ ID NO: 7698 - RNA, 19 nt, Artificial Sequence
  Synthetic
ggacagcgugugugacaaa

SEQ ID NO: 7699 - RNA, 19 nt, Artificial Sequence
  Synthetic
gggauggagcccuggcaua

SEQ ID NO: 7700 - RNA, 19 nt, Artificial Sequence
  Synthetic
cagccaagccuguggacuu

SEQ ID NO: 7701 - RNA, 19 nt, Artificial Sequence
  Synthetic
ggucauagggcagguguaa

SEQ ID NO: 7702 - RNA, 19 nt, Artificial Sequence
  Synthetic
gagcauaaacgcagaguuc

SEQ ID NO: 7703 - RNA, 19 nt, Artificial Sequence
  Synthetic
gcagugggaugaagaccaa

SEQ ID NO: 7704 - RNA, 19 nt, Artificial Sequence
  Synthetic
gugacaaaauucagaucua

SEQ ID NO: 7705 - RNA, 19 nt, Artificial Sequence
  Synthetic
ucauagggcagguguaauu

SEQ ID NO: 7706 - RNA, 19 nt, Artificial Sequence
  Synthetic
acaaugagcacuugaagau

SEQ ID NO: 7707 - RNA, 19 nt, Artificial Sequence
  Synthetic
acugauugcuguagucauu

SEQ ID NO: 7708 - RNA, 19 nt, Artificial Sequence
  Synthetic
cagagaacaaugagcacuu

SEQ ID NO: 7709 - RNA, 19 nt, Artificial Sequence
  Synthetic
acgccuggcuuaugaugaa

SEQ ID NO: 7710 - RNA, 19 nt, Artificial Sequence
  Synthetic
gaucacaaggucaggaguu

SEQ ID NO: 7711 - RNA, 19 nt, Artificial Sequence
  Synthetic
ggagcaucgagguggccaa

SEQ ID NO: 7712 - RNA, 19 nt, Artificial Sequence
  Synthetic
ggaaauacagcacacgaca

SEQ ID NO: 7713 - RNA, 19 nt, Artificial Sequence
  Synthetic
aaugagcacuugaagauuu

SEQ ID NO: 7714 - RNA, 19 nt, Artificial Sequence
  Synthetic
gaagaggugcucagcugaa

SEQ ID NO: 7715 - RNA, 19 nt, Artificial Sequence
  Synthetic
cgacagcacugaggagcau

SEQ ID NO: 7716 - RNA, 19 nt, Artificial Sequence
  Synthetic
gagcaagcugccacgaaga

SEQ ID NO: 7717 - RNA, 19 nt, Artificial Sequence
  Synthetic
caggacagcgugugugaca

SEQ ID NO: 7718 - RNA, 19 nt, Artificial Sequence
  Synthetic
uggcagaauuaucgcaauc

SEQ ID NO: 7719 - RNA, 19 nt, Artificial Sequence
  Synthetic
cgaggcaggcggaucacaa

SEQ ID NO: 7720 - RNA, 19 nt, Artificial Sequence
  Synthetic
ccacugaggaggaaacucu

SEQ ID NO: 7721 - RNA, 19 nt, Artificial Sequence
  Synthetic
cauuuauggucauguaugu

SEQ ID NO: 7722 - RNA, 19 nt, Artificial Sequence
  Synthetic
gccaggaccagcaggugaa

SEQ ID NO: 7723 - RNA, 19 nt, Artificial Sequence
  Synthetic
guucacuguugcagccuuu

SEQ ID NO: 7724 - RNA, 19 nt, Artificial Sequence
  Synthetic
gaguacaguggcacaauca

SEQ ID NO: 7725 - RNA, 19 nt, Artificial Sequence
  Synthetic
gcuguuggccucucuguua

SEQ ID NO: 7726 - RNA, 19 nt, Artificial Sequence
  Synthetic
cugcagcucucuuuaauuu

SEQ ID NO: 7727 - RNA, 19 nt, Artificial Sequence
  Synthetic
agccaagccuguggacuua

SEQ ID NO: 7728 - RNA, 19 nt, Artificial Sequence
  Synthetic
aaacaaagacgcaggcaua

SEQ ID NO: 7729 - RNA, 19 nt, Artificial Sequence
  Synthetic
gcacauguuuggaggauuu

SEQ ID NO: 7730 - RNA, 19 nt, Artificial Sequence
  Synthetic
caauaugccuugaagaauu

SEQ ID NO: 7731 - RNA, 19 nt, Artificial Sequence
  Synthetic
gaguaaagaugcuggggaa

SEQ ID NO: 7732 - RNA, 19 nt, Artificial Sequence
  Synthetic
gagguuagcauuugauaaa

SEQ ID NO: 7733 - RNA, 19 nt, Artificial Sequence
  Synthetic
cugcauagaugaaugguuu

SEQ ID NO: 7734 - RNA, 19 nt, Artificial Sequence
  Synthetic
caguuuguguagaaagaaa

SEQ ID NO: 7735 - RNA, 19 nt, Artificial Sequence
  Synthetic
gaaauguaaucaagcagua

SEQ ID NO: 7736 - RNA, 19 nt, Artificial Sequence
  Synthetic
gggagauacuauagcacga

SEQ ID NO: 7737 - RNA, 19 nt, Artificial Sequence
  Synthetic
uuaacaaagccacgaauaa

SEQ ID NO: 7738 - RNA, 19 nt, Artificial Sequence
  Synthetic
caaaggacacacagggauu

SEQ ID NO: 7739 - RNA, 19 nt, Artificial Sequence
  Synthetic
ccaaagagcaaaucauauu

SEQ ID NO: 7740 - RNA, 19 nt, Artificial Sequence
  Synthetic
aagaauugcagcagggaga

SEQ ID NO: 7741 - RNA, 19 nt, Artificial Sequence
  Synthetic
gaugaaugguuugaaguaa

SEQ ID NO: 7742 - RNA, 19 nt, Artificial Sequence
  Synthetic
ggaauuugagggagauuuu

SEQ ID NO: 7743 - RNA, 19 nt, Artificial Sequence
  Synthetic
gcugaagagaggacaguga

SEQ ID NO: 7744 - RNA, 19 nt, Artificial Sequence
  Synthetic
guuaaucagcagugaauca

SEQ ID NO: 7745 - RNA, 19 nt, Artificial Sequence
  Synthetic
ggagguuagcauuugauaa

SEQ ID NO: 7746 - RNA, 19 nt, Artificial Sequence
  Synthetic
agaugaaugguuugaagua

SEQ ID NO: 7747 - RNA, 19 nt, Artificial Sequence
  Synthetic
ugcaauaugccuugaagaa

SEQ ID NO: 7748 - RNA, 19 nt, Artificial Sequence
  Synthetic
acgccaaaguuaacugauu

SEQ ID NO: 7749 - RNA, 19 nt, Artificial Sequence
  Synthetic
cuccagagcugcacaacua

SEQ ID NO: 7750 - RNA, 19 nt, Artificial Sequence
  Synthetic
guaauacagagauggacaa

SEQ ID NO: 7751 - RNA, 19 nt, Artificial Sequence
  Synthetic
gcacaucccuuaauaguca

SEQ ID NO: 7752 - RNA, 19 nt, Artificial Sequence
  Synthetic
ggauuuaagugcccuguau

SEQ ID NO: 7753 - RNA, 19 nt, Artificial Sequence
  Synthetic
cuacauagguaauacugau

SEQ ID NO: 7754 - RNA, 19 nt, Artificial Sequence
  Synthetic
uaccaaacaugcauacaaa

SEQ ID NO: 7755 - RNA, 19 nt, Artificial Sequence
  Synthetic
ugugaaaccaagaaaugua

SEQ ID NO: 7756 - RNA, 19 nt, Artificial Sequence
  Synthetic
aaaauuuucuggagaggaa

SEQ ID NO: 7757 - RNA, 19 nt, Artificial Sequence
  Synthetic
cgccaaaguuaacugauuu

SEQ ID NO: 7758 - RNA, 19 nt, Artificial Sequence
  Synthetic
aggaauaguucaaggcauu

SEQ ID NO: 7759 - RNA, 19 nt, Artificial Sequence
  Synthetic
gcaaagagaaaguugauuu

SEQ ID NO: 7760 - RNA, 19 nt, Artificial Sequence
  Synthetic
ggugauaggaauaguucaa

SEQ ID NO: 7761 - RNA, 19 nt, Artificial Sequence
  Synthetic
cauuugguguuguggguua

SEQ ID NO: 7762 - RNA, 19 nt, Artificial Sequence
  Synthetic
gaagaagggcucauugaaa

SEQ ID NO: 7763 - RNA, 19 nt, Artificial Sequence
  Synthetic
uuaaagagaagcugaacaa

SEQ ID NO: 7764 - RNA, 19 nt, Artificial Sequence
  Synthetic
gaucccaaguguuuagaaa

SEQ ID NO: 7765 - RNA, 19 nt, Artificial Sequence
  Synthetic
ugaagaggaugaucaguaa

SEQ ID NO: 7766 - RNA, 19 nt, Artificial Sequence
  Synthetic
gcuagagauuccauggauu

SEQ ID NO: 7767 - RNA, 19 nt, Artificial Sequence
  Synthetic
gaagcugaacaauggaaua

SEQ ID NO: 7768 - RNA, 19 nt, Artificial Sequence
  Synthetic
ccuacaaucuggugaccuu

SEQ ID NO: 7769 - RNA, 19 nt, Artificial Sequence
  Synthetic
acaaggagcuuaucggaca

SEQ ID NO: 7770 - RNA, 19 nt, Artificial Sequence
  Synthetic
cuacauggcuuccacuaua

SEQ ID NO: 7771 - RNA, 19 nt, Artificial Sequence
  Synthetic
gagaugaucccaaguguuu

SEQ ID NO: 7772 - RNA, 19 nt, Artificial Sequence
  Synthetic
auacaaagcuuucugcaga

SEQ ID NO: 7773 - RNA, 19 nt, Artificial Sequence
  Synthetic
aagaagggcucauugaaaa

SEQ ID NO: 7774 - RNA, 19 nt, Artificial Sequence
  Synthetic
cuagagauuccauggauuu

SEQ ID NO: 7775 - RNA, 19 nt, Artificial Sequence
  Synthetic
caggagaggauguacaaga

SEQ ID NO: 7776 - RNA, 19 nt, Artificial Sequence
  Synthetic
cuucagagcuacccgaaaa

SEQ ID NO: 7777 - RNA, 19 nt, Artificial Sequence
  Synthetic
guucaaggcauuaacuauu

SEQ ID NO: 7778 - RNA, 19 nt, Artificial Sequence
  Synthetic
uugaagaggaugaucagua

SEQ ID NO: 7779 - RNA, 19 nt, Artificial Sequence
  Synthetic
gauuugaagaggaugauca

SEQ ID NO: 7780 - RNA, 19 nt, Artificial Sequence
  Synthetic
guugauuugaagaggauga

SEQ ID NO: 7781 - RNA, 19 nt, Artificial Sequence
  Synthetic
aagcugaacaauggaauaa

SEQ ID NO: 7782 - RNA, 19 nt, Artificial Sequence
  Synthetic
gcgcacacauuuucuguau

SEQ ID NO: 7783 - RNA, 19 nt, Artificial Sequence
  Synthetic
cagcaggagaggauguaca

SEQ ID NO: 7784 - RNA, 19 nt, Artificial Sequence
  Synthetic
ggagagacuuugccgagau

SEQ ID NO: 7785 - RNA, 19 nt, Artificial Sequence
  Synthetic
uuguggagcuugaugaaga

SEQ ID NO: 7786 - RNA, 19 nt, Artificial Sequence
  Synthetic
ggagcuuaucggacaauau

SEQ ID NO: 7787 - RNA, 19 nt, Artificial Sequence
  Synthetic
caaggagcuuaucggacaa

SEQ ID NO: 7788 - RNA, 19 nt, Artificial Sequence
  Synthetic
acaaagaggaggagaauuu

SEQ ID NO: 7789 - RNA, 19 nt, Artificial Sequence
  Synthetic
gaagaaucuaagaaggaaa

SEQ ID NO: 7790 - RNA, 19 nt, Artificial Sequence
  Synthetic
gcaaggaauugauaacuaa

SEQ ID NO: 7791 - RNA, 19 nt, Artificial Sequence
  Synthetic
uggaguaucuugagaauca

SEQ ID NO: 7792 - RNA, 19 nt, Artificial Sequence
  Synthetic
gacacaaagaggaggagaa

SEQ ID NO: 7793 - RNA, 19 nt, Artificial Sequence
  Synthetic
aaaucauagucaagaggaa

SEQ ID NO: 7794 - RNA, 19 nt, Artificial Sequence
  Synthetic
ggauaaagaugauucaguu

SEQ ID NO: 7795 - RNA, 19 nt, Artificial Sequence
  Synthetic
ggcuacagaagcaggguaa

SEQ ID NO: 7796 - RNA, 19 nt, Artificial Sequence
  Synthetic
aaacauggcccgaaauaau

SEQ ID NO: 7797 - RNA, 19 nt, Artificial Sequence
  Synthetic
caugagacccagacacaaa

SEQ ID NO: 7798 - RNA, 19 nt, Artificial Sequence
  Synthetic
ggagcaaauugaagaaucu

SEQ ID NO: 7799 - RNA, 19 nt, Artificial Sequence
  Synthetic
aaugagaccaucagugaaa

SEQ ID NO: 7800 - RNA, 19 nt, Artificial Sequence
  Synthetic
acaacgaaggcgugaaaga

SEQ ID NO: 7801 - RNA, 19 nt, Artificial Sequence
  Synthetic
aaacaacgaaggcgugaaa

SEQ ID NO: 7802 - RNA, 19 nt, Artificial Sequence
  Synthetic
uaauaaugacccuggaaga

SEQ ID NO: 7803 - RNA, 19 nt, Artificial Sequence
  Synthetic
agcauuaaucagaggcuua

SEQ ID NO: 7804 - RNA, 19 nt, Artificial Sequence
  Synthetic
cgugaaagauggcuacaga

SEQ ID NO: 7805 - RNA, 19 nt, Artificial Sequence
  Synthetic
gaaaggagcaaauugaaga

SEQ ID NO: 7806 - RNA, 19 nt, Artificial Sequence
  Synthetic
acacaaagaggaggagaau

SEQ ID NO: 7807 - RNA, 19 nt, Artificial Sequence
  Synthetic
agagaaaggagcaaauuga

SEQ ID NO: 7808 - RNA, 19 nt, Artificial Sequence
  Synthetic
ccaaagcaucagaaccaaa

SEQ ID NO: 7809 - RNA, 19 nt, Artificial Sequence
  Synthetic
cuacagaagcaggguaaau

SEQ ID NO: 7810 - RNA, 19 nt, Artificial Sequence
  Synthetic
ggaucauaugguaaguaua

SEQ ID NO: 7811 - RNA, 19 nt, Artificial Sequence
  Synthetic
guccaaagcaucagaacca

SEQ ID NO: 7812 - RNA, 19 nt, Artificial Sequence
  Synthetic
aagagagaaaggagcaaau

SEQ ID NO: 7813 - RNA, 19 nt, Artificial Sequence
  Synthetic
agcaaggaauugauaacua

SEQ ID NO: 7814 - RNA, 19 nt, Artificial Sequence
  Synthetic
aaacagaaaucacaggcuu

SEQ ID NO: 7815 - RNA, 19 nt, Artificial Sequence
  Synthetic
aaagauggcuacagaagca

SEQ ID NO: 7816 - RNA, 19 nt, Artificial Sequence
  Synthetic
ugggauugcuggaucauau

SEQ ID NO: 7817 - RNA, 19 nt, Artificial Sequence
  Synthetic
aaucauagucaagaggaaa

SEQ ID NO: 7818 - RNA, 19 nt, Artificial Sequence
  Synthetic
aaugcaagcuccagaaaua

SEQ ID NO: 7819 - RNA, 19 nt, Artificial Sequence
  Synthetic
ggucaugagaggagacaga

SEQ ID NO: 7820 - RNA, 19 nt, Artificial Sequence
  Synthetic
uagauggagucuugggaua

SEQ ID NO: 7821 - RNA, 19 nt, Artificial Sequence
  Synthetic
cagacagguuuuacgaaua

SEQ ID NO: 7822 - RNA, 19 nt, Artificial Sequence
  Synthetic
guucagauguggaugauau

SEQ ID NO: 7823 - RNA, 19 nt, Artificial Sequence
  Synthetic
gguauaugcuuuuagaaga

SEQ ID NO: 7824 - RNA, 19 nt, Artificial Sequence
  Synthetic
ucuaaggguuacugguaua

SEQ ID NO: 7825 - RNA, 19 nt, Artificial Sequence
  Synthetic
ccuaaagaaugugcagaaa

SEQ ID NO: 7826 - RNA, 19 nt, Artificial Sequence
  Synthetic
cagauaaacuccauaccua

SEQ ID NO: 7827 - RNA, 19 nt, Artificial Sequence
  Synthetic
caucacaccuucaaauaua

SEQ ID NO: 7828 - RNA, 19 nt, Artificial Sequence
  Synthetic
ccagaugguuuuagaaugu

SEQ ID NO: 7829 - RNA, 19 nt, Artificial Sequence
  Synthetic
ccuuaugguuuaacagaga

SEQ ID NO: 7830 - RNA, 19 nt, Artificial Sequence
  Synthetic
cugcaguguuaaauuguaa

SEQ ID NO: 7831 - RNA, 19 nt, Artificial Sequence
  Synthetic
gaaauuagaacuagugguu

SEQ ID NO: 7832 - RNA, 19 nt, Artificial Sequence
  Synthetic
gugcaugaccuuaugguuu

SEQ ID NO: 7833 - RNA, 19 nt, Artificial Sequence
  Synthetic
ggaauugggcugcuaacaa

SEQ ID NO: 7834 - RNA, 19 nt, Artificial Sequence
  Synthetic
gcauauauuuugugaagag

SEQ ID NO: 7835 - RNA, 19 nt, Artificial Sequence
  Synthetic
agacagaggccugaagcaa

SEQ ID NO: 7836 - RNA, 19 nt, Artificial Sequence
  Synthetic
agauaaacuccauaccuaa

SEQ ID NO: 7837 - RNA, 19 nt, Artificial Sequence
  Synthetic
acacaagauugacaggaga

SEQ ID NO: 7838 - RNA, 19 nt, Artificial Sequence
  Synthetic
accuaaagaaugugcagaa

SEQ ID NO: 7839 - RNA, 19 nt, Artificial Sequence
  Synthetic
ugucaauacuaccgaacuu

SEQ ID NO: 7840 - RNA, 19 nt, Artificial Sequence
  Synthetic
agacagguuuuacgaauau

SEQ ID NO: 7841 - RNA, 19 nt, Artificial Sequence
  Synthetic
gacagaggccugaagcaaa

SEQ ID NO: 7842 - RNA, 19 nt, Artificial Sequence
  Synthetic
gcagcauauaacaggaauu

SEQ ID NO: 7843 - RNA, 19 nt, Artificial Sequence
  Synthetic
cagcauauauuuugugaag

SEQ ID NO: 7844 - RNA, 19 nt, Artificial Sequence
  Synthetic
cauaaugacuacugauaag

SEQ ID NO: 7845 - RNA, 19 nt, Artificial Sequence
  Synthetic
cuccagaaauauaagguca

SEQ ID NO: 7846 - RNA, 19 nt, Artificial Sequence
  Synthetic
cuaaagaaugugcagaaaa

SEQ ID NO: 7847 - RNA, 19 nt, Artificial Sequence
  Synthetic
gauaaacuccauaccuaaa

SEQ ID NO: 7848 - RNA, 19 nt, Artificial Sequence
  Synthetic
uggcuaagcaagacaaauu

SEQ ID NO: 7849 - RNA, 19 nt, Artificial Sequence
  Synthetic
ggauggacuuugaagacuu

SEQ ID NO: 7850 - RNA, 19 nt, Artificial Sequence
  Synthetic
ccacugaugacgacacuua

SEQ ID NO: 7851 - RNA, 19 nt, Artificial Sequence
  Synthetic
cguccuauuucgaugaaca

SEQ ID NO: 7852 - RNA, 19 nt, Artificial Sequence
  Synthetic
gaggagcacagacgagaua

SEQ ID NO: 7853 - RNA, 19 nt, Artificial Sequence
  Synthetic
cugccaagacugugguuga

SEQ ID NO: 7854 - RNA, 19 nt, Artificial Sequence
  Synthetic
ccaagacugugguugagaa

SEQ ID NO: 7855 - RNA, 19 nt, Artificial Sequence
  Synthetic
gagcaggagacgcgaacca

SEQ ID NO: 7856 - RNA, 19 nt, Artificial Sequence
  Synthetic
gaaaacagcagcagcaaca

SEQ ID NO: 7857 - RNA, 19 nt, Artificial Sequence
  Synthetic
uggaauuugaggaggagga

SEQ ID NO: 7858 - RNA, 19 nt, Artificial Sequence
  Synthetic
gcaaggucacuuuucaaua

SEQ ID NO: 7859 - RNA, 19 nt, Artificial Sequence
  Synthetic
gcuaugagcugcccacuga

SEQ ID NO: 7860 - RNA, 19 nt, Artificial Sequence
  Synthetic
caggagacgcgaaccaaca

SEQ ID NO: 7861 - RNA, 19 nt, Artificial Sequence
  Synthetic
ggagacugccauugagaug

SEQ ID NO: 7862 - RNA, 19 nt, Artificial Sequence
  Synthetic
gaauccucauuaaagguuu

SEQ ID NO: 7863 - RNA, 19 nt, Artificial Sequence
  Synthetic
gaggagacugccauugaga

SEQ ID NO: 7864 - RNA, 19 nt, Artificial Sequence
  Synthetic
ggaggaggagacugccauu

SEQ ID NO: 7865 - RNA, 19 nt, Artificial Sequence
  Synthetic
aggaggagacugccauuga

SEQ ID NO: 7866 - RNA, 19 nt, Artificial Sequence
  Synthetic
aaccuugaauccucauuaa

SEQ ID NO: 7867 - RNA, 19 nt, Artificial Sequence
  Synthetic
cagccauggcguccuauuu

SEQ ID NO: 7868 - RNA, 19 nt, Artificial Sequence
  Synthetic
caauaggauggacuuugaa

SEQ ID NO: 7869 - RNA, 19 nt, Artificial Sequence
  Synthetic
uaaccuugaauccucauua

SEQ ID NO: 7870 - RNA, 19 nt, Artificial Sequence
  Synthetic
caaggucacuuuucaauag

SEQ ID NO: 7871 - RNA, 19 nt, Artificial Sequence
  Synthetic
ccuugaauccucauuaaag

SEQ ID NO: 7872 - RNA, 19 nt, Artificial Sequence
  Synthetic
cugaugacgacacuuauga

SEQ ID NO: 7873 - RNA, 19 nt, Artificial Sequence
  Synthetic
gagcucgcaaggucacuuu

SEQ ID NO: 7874 - RNA, 19 nt, Artificial Sequence
  Synthetic
gauggacuuugaagacuug

SEQ ID NO: 7875 - RNA, 19 nt, Artificial Sequence
  Synthetic
cuugaauccucauuaaagg

SEQ ID NO: 7876 - RNA, 19 nt, Artificial Sequence
  Synthetic
gccaucaccuuuuccauuc

SEQ ID NO: 7877 - RNA, 19 nt, Artificial Sequence
  Synthetic
ugaauccucauuaaagguu

SEQ ID NO: 7878 - RNA, 19 nt, Artificial Sequence
  Synthetic
gaagauauuuucaggguuu

SEQ ID NO: 7879 - RNA, 19 nt, Artificial Sequence
  Synthetic
gagaaagaccaaccagaaa

SEQ ID NO: 7880 - RNA, 19 nt, Artificial Sequence
  Synthetic
cauaagagcugucuggaga

SEQ ID NO: 7881 - RNA, 19 nt, Artificial Sequence
  Synthetic
ggagaaagaccaaccagaa

SEQ ID NO: 7882 - RNA, 19 nt, Artificial Sequence
  Synthetic
uguccuagcgcaagaguua

SEQ ID NO: 7883 - RNA, 19 nt, Artificial Sequence
  Synthetic
cagcuggacuccugaagaa

SEQ ID NO: 7884 - RNA, 19 nt, Artificial Sequence
  Synthetic
ccuuaaagcuggaacauuc

SEQ ID NO: 7885 - RNA, 19 nt, Artificial Sequence
  Synthetic
cggaguuugcaguggagaa

SEQ ID NO: 7886 - RNA, 19 nt, Artificial Sequence
  Synthetic
ggaguuugcaguggagaaa

SEQ ID NO: 7887 - RNA, 19 nt, Artificial Sequence
  Synthetic
gauccugugugaagauauu

SEQ ID NO: 7888 - RNA, 19 nt, Artificial Sequence
  Synthetic
ugaagaagguggcagagga

SEQ ID NO: 7889 - RNA, 19 nt, Artificial Sequence
  Synthetic
gcugcgacaugguguguuu

SEQ ID NO: 7890 - RNA, 19 nt, Artificial Sequence
  Synthetic
gaacuguccuagcgcaaga

SEQ ID NO: 7891 - RNA, 19 nt, Artificial Sequence
  Synthetic
ccgaguggagaaagaccaa

SEQ ID NO: 7892 - RNA, 19 nt, Artificial Sequence
  Synthetic
ucacagaguggcugaagga

SEQ ID NO: 7893 - RNA, 19 nt, Artificial Sequence
  Synthetic
ccacuuuggagcucagauu

SEQ ID NO: 7894 - RNA, 19 nt, Artificial Sequence
  Synthetic
gcagaggagacaccaguau

SEQ ID NO: 7895 - RNA, 19 nt, Artificial Sequence
  Synthetic
agaaaguucgccugaagau

SEQ ID NO: 7896 - RNA, 19 nt, Artificial Sequence
  Synthetic
ccagaaaguucgccugaag

SEQ ID NO: 7897 - RNA, 19 nt, Artificial Sequence
  Synthetic
agucugugauccuguguga

SEQ ID NO: 7898 - RNA, 19 nt, Artificial Sequence
  Synthetic
gugcaguggugugaucaua

SEQ ID NO: 7899 - RNA, 19 nt, Artificial Sequence
  Synthetic
ugcccuagcucgucucaaa

SEQ ID NO: 7900 - RNA, 19 nt, Artificial Sequence
  Synthetic
agaggagacaccaguauga

SEQ ID NO: 7901 - RNA, 19 nt, Artificial Sequence
  Synthetic
gagaaguggcuuuccucau

SEQ ID NO: 7902 - RNA, 19 nt, Artificial Sequence
  Synthetic
gaaagaccaaccagaaagu

SEQ ID NO: 7903 - RNA, 19 nt, Artificial Sequence
  Synthetic
cagaaaguucgccugaaga

SEQ ID NO: 7904 - RNA, 19 nt, Artificial Sequence
  Synthetic
cuccugggcucaagagguu

SEQ ID NO: 7905 - RNA, 19 nt, Artificial Sequence
  Synthetic
ggacacaccgagugauggu

SEQ ID NO: 7906 - RNA, 19 nt, Artificial Sequence
  Synthetic
ggagugcaguggugugauc

SEQ ID NO: 7907 - RNA, 19 nt, Artificial Sequence
  Synthetic
gcacccucgacuuuauaua

SEQ ID NO: 7908 - RNA, 19 nt, Artificial Sequence
  Synthetic
gcuaauugcuuguaggaua

SEQ ID NO: 7909 - RNA, 19 nt, Artificial Sequence
  Synthetic
ccacaaacuaagaaugaua

SEQ ID NO: 7910 - RNA, 19 nt, Artificial Sequence
  Synthetic
ggaaguggcucuacagauu

SEQ ID NO: 7911 - RNA, 19 nt, Artificial Sequence
  Synthetic
guguauacgucuaagauuu

SEQ ID NO: 7912 - RNA, 19 nt, Artificial Sequence
  Synthetic
gauaguaaauggucaguau

SEQ ID NO: 7913 - RNA, 19 nt, Artificial Sequence
  Synthetic
ccacuugcucggaggguua

SEQ ID NO: 7914 - RNA, 19 nt, Artificial Sequence
  Synthetic
gggaagaaauagaaaugca

SEQ ID NO: 7915 - RNA, 19 nt, Artificial Sequence
  Synthetic
gaaacuauauagagcucaa

SEQ ID NO: 7916 - RNA, 19 nt, Artificial Sequence
  Synthetic
gaggagggagaaagggaua

SEQ ID NO: 7917 - RNA, 19 nt, Artificial Sequence
  Synthetic
gccaaggaaucgacauaua

SEQ ID NO: 7918 - RNA, 19 nt, Artificial Sequence
  Synthetic
auauagagcucaaugaaga

SEQ ID NO: 7919 - RNA, 19 nt, Artificial Sequence
  Synthetic
ggucaguauugaaaccuaa

SEQ ID NO: 7920 - RNA, 19 nt, Artificial Sequence
  Synthetic
aagaauugcuaaagcugaa

SEQ ID NO: 7921 - RNA, 19 nt, Artificial Sequence
  Synthetic
cguaaaggcauggguauaa

SEQ ID NO: 7922 - RNA, 19 nt, Artificial Sequence
  Synthetic
agacaaacacguauaucaa

SEQ ID NO: 7923 - RNA, 19 nt, Artificial Sequence
  Synthetic
gcuuugagaaugagguuau

SEQ ID NO: 7924 - RNA, 19 nt, Artificial Sequence
  Synthetic
ggaaagaagauguugccau

SEQ ID NO: 7925 - RNA, 19 nt, Artificial Sequence
  Synthetic
aggcauggguauaauggua

SEQ ID NO: 7926 - RNA, 19 nt, Artificial Sequence
  Synthetic
cuacauuuccugagagcau

SEQ ID NO: 7927 - RNA, 19 nt, Artificial Sequence
  Synthetic
gcgcagaggaagucagcca

SEQ ID NO: 7928 - RNA, 19 nt, Artificial Sequence
  Synthetic
ccaaagcacugauauuaua

SEQ ID NO: 7929 - RNA, 19 nt, Artificial Sequence
  Synthetic
gaagauaaucauagguugu

SEQ ID NO: 7930 - RNA, 19 nt, Artificial Sequence
  Synthetic
gggaguauccuucugguaa

SEQ ID NO: 7931 - RNA, 19 nt, Artificial Sequence
  Synthetic
gccaacaagaucugugaaa

SEQ ID NO: 7932 - RNA, 19 nt, Artificial Sequence
  Synthetic
ccuccagaaucaagacgaa

SEQ ID NO: 7933 - RNA, 19 nt, Artificial Sequence
  Synthetic
ggauuaucauguaguccua

SEQ ID NO: 7934 - RNA, 19 nt, Artificial Sequence
  Synthetic
gcgcaagaaugauauccaa

SEQ ID NO: 7935 - RNA, 19 nt, Artificial Sequence
  Synthetic
uguugucacuggaaggaaa

SEQ ID NO: 7936 - RNA, 19 nt, Artificial Sequence
  Synthetic
gcacugagagccaagacaa

SEQ ID NO: 7937 - RNA, 19 nt, Artificial Sequence
  Synthetic
ccagagacauaguuuauau

SEQ ID NO: 7938 - RNA, 19 nt, Artificial Sequence
  Synthetic
gcaagagaguggacacaaa

SEQ ID NO: 7939 - RNA, 19 nt, Artificial Sequence
  Synthetic
uaugaaaccucuagagauu

SEQ ID NO: 7940 - RNA, 19 nt, Artificial Sequence
  Synthetic
acacaaggagggagagaga

SEQ ID NO: 7941 - RNA, 19 nt, Artificial Sequence
  Synthetic
gcagagaggucuucccuua

SEQ ID NO: 7942 - RNA, 19 nt, Artificial Sequence
  Synthetic
ccuacaaggccgacagaga

SEQ ID NO: 7943 - RNA, 19 nt, Artificial Sequence
  Synthetic
ccacauacccuuugccuuu

SEQ ID NO: 7944 - RNA, 19 nt, Artificial Sequence
  Synthetic
guacaacagacuagcaaga

SEQ ID NO: 7945 - RNA, 19 nt, Artificial Sequence
  Synthetic
ccgacagagagaaguacaa

SEQ ID NO: 7946 - RNA, 19 nt, Artificial Sequence
  Synthetic
ggaauugggaacaguguca

SEQ ID NO: 7947 - RNA, 19 nt, Artificial Sequence
  Synthetic
acaacagacuagcaagaga

SEQ ID NO: 7948 - RNA, 19 nt, Artificial Sequence
  Synthetic
gcagcauguuggugccauu

SEQ ID NO: 7949 - RNA, 19 nt, Artificial Sequence
  Synthetic
gaacacaaggagggagaga

SEQ ID NO: 7950 - RNA, 19 nt, Artificial Sequence
  Synthetic
caggauacaaagcacauaa

SEQ ID NO: 7951 - RNA, 19 nt, Artificial Sequence
  Synthetic
aagcggauccagaaggaau

SEQ ID NO: 7952 - RNA, 19 nt, Artificial Sequence
  Synthetic
aggccgacagagagaagua

SEQ ID NO: 7953 - RNA, 19 nt, Artificial Sequence
  Synthetic
ccuuggagguuuuacauga

SEQ ID NO: 7954 - RNA, 19 nt, Artificial Sequence
  Synthetic
gagagaaguacaacagacu

SEQ ID NO: 7955 - RNA, 19 nt, Artificial Sequence
  Synthetic
caagaagcagcaaguggaa

SEQ ID NO: 7956 - RNA, 19 nt, Artificial Sequence
  Synthetic
ccuaauaucaacagcaaug

SEQ ID NO: 7957 - RNA, 19 nt, Artificial Sequence
  Synthetic
gagccuacacuaaguccaa

SEQ ID NO: 7958 - RNA, 19 nt, Artificial Sequence
  Synthetic
caagagaagcuggcagaga

SEQ ID NO: 7959 - RNA, 19 nt, Artificial Sequence
  Synthetic
gaaugacaguccuuaccaa

SEQ ID NO: 7960 - RNA, 19 nt, Artificial Sequence
  Synthetic
cagagauagcacacaccua

SEQ ID NO: 7961 - RNA, 19 nt, Artificial Sequence
  Synthetic
acccuaauaucaacagcaa

SEQ ID NO: 7962 - RNA, 19 nt, Artificial Sequence
  Synthetic
gagaaguacaacagacuag

SEQ ID NO: 7963 - RNA, 19 nt, Artificial Sequence
  Synthetic
agaaggaauuaaccgacuu

SEQ ID NO: 7964 - RNA, 19 nt, Artificial Sequence
  Synthetic
ccacuuuccuacagauuac

SEQ ID NO: 7965 - RNA, 19 nt, Artificial Sequence
  Synthetic
guaagugccuuggagguuu

SEQ ID NO: 7966 - RNA, 19 nt, Artificial Sequence
  Synthetic
agaagcaagagcaaaauua

SEQ ID NO: 7967 - RNA, 19 nt, Artificial Sequence
  Synthetic
gggcagagcaggcuuuguu

SEQ ID NO: 7968 - RNA, 19 nt, Artificial Sequence
  Synthetic
gcaggaaagccuugauaaa

SEQ ID NO: 7969 - RNA, 19 nt, Artificial Sequence
  Synthetic
agaaagaaccacaggaaaa

SEQ ID NO: 7970 - RNA, 19 nt, Artificial Sequence
  Synthetic
gcaaagaggcagagcacca

SEQ ID NO: 7971 - RNA, 19 nt, Artificial Sequence
  Synthetic
gggcaaaaggcaaaaguaa

SEQ ID NO: 7972 - RNA, 19 nt, Artificial Sequence
  Synthetic
gguaacaaacagugaauau

SEQ ID NO: 7973 - RNA, 19 nt, Artificial Sequence
  Synthetic
agagcuaagucaagaagaa

SEQ ID NO: 7974 - RNA, 19 nt, Artificial Sequence
  Synthetic
caagaaugacuccgagaaa

SEQ ID NO: 7975 - RNA, 19 nt, Artificial Sequence
  Synthetic
aaguuuggccagugggaaa

SEQ ID NO: 7976 - RNA, 19 nt, Artificial Sequence
  Synthetic
aaucagaccacgaggaaga

SEQ ID NO: 7977 - RNA, 19 nt, Artificial Sequence
  Synthetic
ccacauggucugucagcaa

SEQ ID NO: 7978 - RNA, 19 nt, Artificial Sequence
  Synthetic
aaaccaguguggaggaaau

SEQ ID NO: 7979 - RNA, 19 nt, Artificial Sequence
  Synthetic
agaaugacuccgagaaaga

SEQ ID NO: 7980 - RNA, 19 nt, Artificial Sequence
  Synthetic
acauguaucuagugcacaa

SEQ ID NO: 7981 - RNA, 19 nt, Artificial Sequence
  Synthetic
gcucaagaccuuugccauu

SEQ ID NO: 7982 - RNA, 19 nt, Artificial Sequence
  Synthetic
ggagagagacuuuguuuau

SEQ ID NO: 7983 - RNA, 19 nt, Artificial Sequence
  Synthetic
ucaaaguuccugugagcua

SEQ ID NO: 7984 - RNA, 19 nt, Artificial Sequence
  Synthetic
aagaaagaaccacaggaaa

SEQ ID NO: 7985 - RNA, 19 nt, Artificial Sequence
  Synthetic
aaagaaagaaccacaggaa

SEQ ID NO: 7986 - RNA, 19 nt, Artificial Sequence
  Synthetic
gagcuaagaagcaagaaga

SEQ ID NO: 7987 - RNA, 19 nt, Artificial Sequence
  Synthetic
gcacgaaauuccauaacca

SEQ ID NO: 7988 - RNA, 19 nt, Artificial Sequence
  Synthetic
acacgaggccuaagaauuu

SEQ ID NO: 7989 - RNA, 19 nt, Artificial Sequence
  Synthetic
auaacaugguagaaggaga

SEQ ID NO: 7990 - RNA, 19 nt, Artificial Sequence
  Synthetic
gcaaaggacuauaacaugu

SEQ ID NO: 7991 - RNA, 19 nt, Artificial Sequence
  Synthetic
ucucggaguuccugaagua

SEQ ID NO: 7992 - RNA, 19 nt, Artificial Sequence
  Synthetic
cauacaacuuugagccaga

SEQ ID NO: 7993 - RNA, 19 nt, Artificial Sequence
  Synthetic
gcacaaaacugacccgauu

SEQ ID NO: 7994 - RNA, 19 nt, Artificial Sequence
  Synthetic
aaagagaacucaaaggcca

SEQ ID NO: 7995 - RNA, 19 nt, Artificial Sequence
  Synthetic
ccugugagcuacuguggaa

SEQ ID NO: 7996 - RNA, 19 nt, Artificial Sequence
  Synthetic
gcugugagagcaagaacaa

SEQ ID NO: 7997 - RNA, 19 nt, Artificial Sequence
  Synthetic
agagcaagaacaagaauga

SEQ ID NO: 7998 - RNA, 19 nt, Artificial Sequence
  Synthetic
cagagaaggaugagagaau

SEQ ID NO: 7999 - RNA, 19 nt, Artificial Sequence
  Synthetic
gaguaaagauucugcugaa

SEQ ID NO: 8000 - RNA, 19 nt, Artificial Sequence
  Synthetic
gaauggaaauaguggaaca

SEQ ID NO: 8001 - RNA, 19 nt, Artificial Sequence
  Synthetic
aaagagaccugcugauaaa

SEQ ID NO: 8002 - RNA, 19 nt, Artificial Sequence
  Synthetic
gggaauggaaauaguggaa

SEQ ID NO: 8003 - RNA, 19 nt, Artificial Sequence
  Synthetic
ucaaagauccauugguuaa

SEQ ID NO: 8004 - RNA, 19 nt, Artificial Sequence
  Synthetic
ccaccgagauugucauaaa

SEQ ID NO: 8005 - RNA, 19 nt, Artificial Sequence
  Synthetic
gaacagaagucaagacauc

SEQ ID NO: 8006 - RNA, 19 nt, Artificial Sequence
  Synthetic
gucaguaacuaguggcuua

SEQ ID NO: 8007 - RNA, 19 nt, Artificial Sequence
  Synthetic
ccauuaagcaagagcccaa

SEQ ID NO: 8008 - RNA, 19 nt, Artificial Sequence
  Synthetic
gauuacagauggucaagaa

SEQ ID NO: 8009 - RNA, 19 nt, Artificial Sequence
  Synthetic
acaaaacaauacugggaaa

SEQ ID NO: 8010 - RNA, 19 nt, Artificial Sequence
  Synthetic
ggaaauucuucuagugcca

SEQ ID NO: 8011 - RNA, 19 nt, Artificial Sequence
  Synthetic
cagccaacuaagugggaau

SEQ ID NO: 8012 - RNA, 19 nt, Artificial Sequence
  Synthetic
cugaaaagguaaagaagga

SEQ ID NO: 8013 - RNA, 19 nt, Artificial Sequence
  Synthetic
uggaaauaguggaacauca

SEQ ID NO: 8014 - RNA, 19 nt, Artificial Sequence
  Synthetic
gguaaagaaggaagcugaa

SEQ ID NO: 8015 - RNA, 19 nt, Artificial Sequence
  Synthetic
gucaagacauccacaguua

SEQ ID NO: 8016 - RNA, 19 nt, Artificial Sequence
  Synthetic
cagacaaggaagcgaauga

SEQ ID NO: 8017 - RNA, 19 nt, Artificial Sequence
  Synthetic
agacaucacugaaggaguu

SEQ ID NO: 8018 - RNA, 19 nt, Artificial Sequence
  Synthetic
ggaaguacuaccagcaaaa

SEQ ID NO: 8019 - RNA, 19 nt, Artificial Sequence
  Synthetic
agguaaagaaggaagcuga

SEQ ID NO: 8020 - RNA, 19 nt, Artificial Sequence
  Synthetic
gaaaauggaggaaguauaa

SEQ ID NO: 8021 - RNA, 19 nt, Artificial Sequence
  Synthetic
accagaaacuaaacugaaa

SEQ ID NO: 8022 - RNA, 19 nt, Artificial Sequence
  Synthetic
caacuaagugggaauggaa

SEQ ID NO: 8023 - RNA, 19 nt, Artificial Sequence
  Synthetic
ccaaaguagcaaggauuua

SEQ ID NO: 8024 - RNA, 19 nt, Artificial Sequence
  Synthetic
uggaaguacuaccagcaaa

SEQ ID NO: 8025 - RNA, 19 nt, Artificial Sequence
  Synthetic
cugcguuguuuguaggcaa

SEQ ID NO: 8026 - RNA, 19 nt, Artificial Sequence
  Synthetic
acuaagugggaauggaaau

SEQ ID NO: 8027 - RNA, 19 nt, Artificial Sequence
  Synthetic
gaaguaauguggccaagua

SEQ ID NO: 8028 - RNA, 19 nt, Artificial Sequence
  Synthetic
gaaacgagauccagagauu

SEQ ID NO: 8029 - RNA, 19 nt, Artificial Sequence
  Synthetic
ugacacagcuggaguuaaa

SEQ ID NO: 8030 - RNA, 19 nt, Artificial Sequence
  Synthetic
ucuuaaacguggaaaggaa

SEQ ID NO: 8031 - RNA, 19 nt, Artificial Sequence
  Synthetic
gaggaagagcuccgggaaa

SEQ ID NO: 8032 - RNA, 19 nt, Artificial Sequence
  Synthetic
aggaagagcuccgggaaau

SEQ ID NO: 8033 - RNA, 19 nt, Artificial Sequence
  Synthetic
agucagggcuggaauacua

SEQ ID NO: 8034 - RNA, 19 nt, Artificial Sequence
  Synthetic
gcaaauggaucagaacaaa

SEQ ID NO: 8035 - RNA, 19 nt, Artificial Sequence
  Synthetic
gggaaauccugacggaguu

SEQ ID NO: 8036 - RNA, 19 nt, Artificial Sequence
  Synthetic
uaaagaucgcucugggaaa

SEQ ID NO: 8037 - RNA, 19 nt, Artificial Sequence
  Synthetic
aagcaggagugucaauaaa

SEQ ID NO: 8038 - RNA, 19 nt, Artificial Sequence
  Synthetic
gaacaguugauguccauaa

SEQ ID NO: 8039 - RNA, 19 nt, Artificial Sequence
  Synthetic
gcuggaaaaugaaagaaua

SEQ ID NO: 8040 - RNA, 19 nt, Artificial Sequence
  Synthetic
gaguuagaguggcagaaca

SEQ ID NO: 8041 - RNA, 19 nt, Artificial Sequence
  Synthetic
ccacaagccugcagggaau

SEQ ID NO: 8042 - RNA, 19 nt, Artificial Sequence
  Synthetic
cuggaauaauggaaagaaa

SEQ ID NO: 8043 - RNA, 19 nt, Artificial Sequence
  Synthetic
aggcaaggcugcaagauua

SEQ ID NO: 8044 - RNA, 19 nt, Artificial Sequence
  Synthetic
gcaagauccucgaguacaa

SEQ ID NO: 8045 - RNA, 19 nt, Artificial Sequence
  Synthetic
gcgaggagaucgagacgca

SEQ ID NO: 8046 - RNA, 19 nt, Artificial Sequence
  Synthetic
gcaagcaggauguguacua

SEQ ID NO: 8047 - RNA, 19 nt, Artificial Sequence
  Synthetic
gggcaaccaucaagcgcau

SEQ ID NO: 8048 - RNA, 19 nt, Artificial Sequence
  Synthetic
cuaucaaggcccaggcuuu

SEQ ID NO: 8049 - RNA, 19 nt, Artificial Sequence
  Synthetic
gggccaagaccaacaccua

SEQ ID NO: 8050 - RNA, 19 nt, Artificial Sequence
  Synthetic
cagcaaaccaacacauaca

SEQ ID NO: 8051 - RNA, 19 nt, Artificial Sequence
  Synthetic
ggaauaauggaaagaaaug

SEQ ID NO: 8052 - RNA, 19 nt, Artificial Sequence
  Synthetic
gcugcaagauuaaggccuu

SEQ ID NO: 8053 - RNA, 19 nt, Artificial Sequence
  Synthetic
guaucuggaauaauggaaa

SEQ ID NO: 8054 - RNA, 19 nt, Artificial Sequence
  Synthetic
cugaagggcagcagcaaca

SEQ ID NO: 8055 - RNA, 19 nt, Artificial Sequence
  Synthetic
ucuagugguaucuggaaua

SEQ ID NO: 8056 - RNA, 19 nt, Artificial Sequence
  Synthetic
caggcaaggcugcaagauu

SEQ ID NO: 8057 - RNA, 19 nt, Artificial Sequence
  Synthetic
ggcaaggcugcaagauuaa

SEQ ID NO: 8058 - RNA, 19 nt, Artificial Sequence
  Synthetic
ccucaauccuaaaucugaa

SEQ ID NO: 8059 - RNA, 19 nt, Artificial Sequence
  Synthetic
agaccaacaccuacaucaa

SEQ ID NO: 8060 - RNA, 19 nt, Artificial Sequence
  Synthetic
guucauggugacagggcga

SEQ ID NO: 8061 - RNA, 19 nt, Artificial Sequence
  Synthetic
acgcaagccauccgaauau

SEQ ID NO: 8062 - RNA, 19 nt, Artificial Sequence
  Synthetic
caaaccaacacauacauua

SEQ ID NO: 8063 - RNA, 19 nt, Artificial Sequence
  Synthetic
cuggcaagauccucgagua

SEQ ID NO: 8064 - RNA, 19 nt, Artificial Sequence
  Synthetic
gcucugcgcucucuacaaa

SEQ ID NO: 8065 - RNA, 19 nt, Artificial Sequence
  Synthetic
agugaaacuuuauccugaa

SEQ ID NO: 8066 - RNA, 19 nt, Artificial Sequence
  Synthetic
gcauccagcagcaaaccaa

SEQ ID NO: 8067 - RNA, 19 nt, Artificial Sequence
  Synthetic
ucagcuggcucucgaucaa

SEQ ID NO: 8068 - RNA, 19 nt, Artificial Sequence
  Synthetic
accgagggcugcuggaaga

SEQ ID NO: 8069 - RNA, 19 nt, Artificial Sequence
  Synthetic
gcuccagggcuucucuaaa

SEQ ID NO: 8070 - RNA, 19 nt, Artificial Sequence
  Synthetic
gggauugcauggucugcuu

SEQ ID NO: 8071 - RNA, 19 nt, Artificial Sequence
  Synthetic
agagauggcugaagauaua

SEQ ID NO: 8072 - RNA, 19 nt, Artificial Sequence
  Synthetic
cagaagaagaggaagaaga

SEQ ID NO: 8073 - RNA, 19 nt, Artificial Sequence
  Synthetic
agucagaggaugaaggaau

SEQ ID NO: 8074 - RNA, 19 nt, Artificial Sequence
  Synthetic
gcaaauaaaugccaccuua

SEQ ID NO: 8075 - RNA, 19 nt, Artificial Sequence
  Synthetic
agaagaagaggaagaagaa

SEQ ID NO: 8076 - RNA, 19 nt, Artificial Sequence
  Synthetic
cagauagacuuaugaaaga

SEQ ID NO: 8077 - RNA, 19 nt, Artificial Sequence
  Synthetic
acuaugagaugaaggaaga

SEQ ID NO: 8078 - RNA, 19 nt, Artificial Sequence
  Synthetic
caauugaagugguugauau

SEQ ID NO: 8079 - RNA, 19 nt, Artificial Sequence
  Synthetic
aagaagaggaagaagaaga

SEQ ID NO: 8080 - RNA, 19 nt, Artificial Sequence
  Synthetic
acaagaaccacgagcgauu

SEQ ID NO: 8081 - RNA, 19 nt, Artificial Sequence
  Synthetic
cgauaugguuuguggauuc

SEQ ID NO: 8082 - RNA, 19 nt, Artificial Sequence
  Synthetic
agucaaaggcaaagccaga

SEQ ID NO: 8083 - RNA, 19 nt, Artificial Sequence
  Synthetic
ggaagaagaagaagagaug

SEQ ID NO: 8084 - RNA, 19 nt, Artificial Sequence
  Synthetic
guauggaacuucucacaaa

SEQ ID NO: 8085 - RNA, 19 nt, Artificial Sequence
  Synthetic
augaaagagcucagggaca

SEQ ID NO: 8086 - RNA, 19 nt, Artificial Sequence
  Synthetic
aggaagaagaagaagagau

SEQ ID NO: 8087 - RNA, 19 nt, Artificial Sequence
  Synthetic
agaagaggaagaagaagaa

SEQ ID NO: 8088 - RNA, 19 nt, Artificial Sequence
  Synthetic
cugaagauauagaagacuu

SEQ ID NO: 8089 - RNA, 19 nt, Artificial Sequence
  Synthetic
uaggaagacucaaaggcaa

SEQ ID NO: 8090 - RNA, 19 nt, Artificial Sequence
  Synthetic
cuccaaaggaagauggcua

SEQ ID NO: 8091 - RNA, 19 nt, Artificial Sequence
  Synthetic
aagaagagauggcugaaga

SEQ ID NO: 8092 - RNA, 19 nt, Artificial Sequence
  Synthetic
gaaugggacaacagaagaa

SEQ ID NO: 8093 - RNA, 19 nt, Artificial Sequence
  Synthetic
uauacagaucacagaguua

SEQ ID NO: 8094 - RNA, 19 nt, Artificial Sequence
  Synthetic
ugaaagagcucagggacau

SEQ ID NO: 8095 - RNA, 19 nt, Artificial Sequence
  Synthetic
agugcaagcuucagauaga

SEQ ID NO: 8096 - RNA, 19 nt, Artificial Sequence
  Synthetic
uagaagacuuagaucacua

SEQ ID NO: 8097 - RNA, 19 nt, Artificial Sequence
  Synthetic
uuauaugacuggcauguua

SEQ ID NO: 8098 - RNA, 19 nt, Artificial Sequence
  Synthetic
gaagauacuaagaacaaca

SEQ ID NO: 8099 - RNA, 19 nt, Artificial Sequence
  Synthetic
ugaaggaagaagagccuau

SEQ ID NO: 8100 - RNA, 19 nt, Artificial Sequence
  Synthetic
aagaagaagagauggcuga

SEQ ID NO: 8101 - RNA, 19 nt, Artificial Sequence
  Synthetic
ggacauaggaggagaugca

SEQ ID NO: 8102 - RNA, 19 nt, Artificial Sequence
  Synthetic
gagcagggaucuugaguca

SEQ ID NO: 8103 - RNA, 19 nt, Artificial Sequence
  Synthetic
gugauggagucaagauuua

SEQ ID NO: 8104 - RNA, 19 nt, Artificial Sequence
  Synthetic
gcgacgaggaggaguacua

SEQ ID NO: 8105 - RNA, 19 nt, Artificial Sequence
  Synthetic
aguggaagguccuaaauua

SEQ ID NO: 8106 - RNA, 19 nt, Artificial Sequence
  Synthetic
gccucaagcuggagacauu

SEQ ID NO: 8107 - RNA, 19 nt, Artificial Sequence
  Synthetic
gcaaauauguaguguuuuc

SEQ ID NO: 8108 - RNA, 19 nt, Artificial Sequence
  Synthetic
ggaagggcauaaagaauca

SEQ ID NO: 8109 - RNA, 19 nt, Artificial Sequence
  Synthetic
gguccagauugcugccaua

SEQ ID NO: 8110 - RNA, 19 nt, Artificial Sequence
  Synthetic
gugccacauucuagauuua

SEQ ID NO: 8111 - RNA, 19 nt, Artificial Sequence
  Synthetic
gagucaagauuuaggauuc

SEQ ID NO: 8112 - RNA, 19 nt, Artificial Sequence
  Synthetic
ccacagggcaucuggcaau

SEQ ID NO: 8113 - RNA, 19 nt, Artificial Sequence
  Synthetic
ggagguaccagcuggacaa

SEQ ID NO: 8114 - RNA, 19 nt, Artificial Sequence
  Synthetic
gguagagacaccuggauga

SEQ ID NO: 8115 - RNA, 19 nt, Artificial Sequence
  Synthetic
ggacacugaugcacaaaga

SEQ ID NO: 8116 - RNA, 19 nt, Artificial Sequence
  Synthetic
ggaccaaugccagaagaaa

SEQ ID NO: 8117 - RNA, 19 nt, Artificial Sequence
  Synthetic
ugacaagaccaaggacaua

SEQ ID NO: 8118 - RNA, 19 nt, Artificial Sequence
  Synthetic
cagagaagacagauguuga

SEQ ID NO: 8119 - RNA, 19 nt, Artificial Sequence
  Synthetic
cagugaaccagcaguggaa

SEQ ID NO: 8120 - RNA, 19 nt, Artificial Sequence
  Synthetic
cagugaaccaucaguggaa

SEQ ID NO: 8121 - RNA, 19 nt, Artificial Sequence
  Synthetic
gcaucuggcaauaagacua

SEQ ID NO: 8122 - RNA, 19 nt, Artificial Sequence
  Synthetic
gauccugccugaagguuuu

SEQ ID NO: 8123 - RNA, 19 nt, Artificial Sequence
  Synthetic
cgaggacacugaugcacaa

SEQ ID NO: 8124 - RNA, 19 nt, Artificial Sequence
  Synthetic
gaggugaugaugauagcaa

SEQ ID NO: 8125 - RNA, 19 nt, Artificial Sequence
  Synthetic
ggcaauaagacuaguauac

SEQ ID NO: 8126 - RNA, 19 nt, Artificial Sequence
  Synthetic
augacaagaccaaggacau

SEQ ID NO: 8127 - RNA, 19 nt, Artificial Sequence
  Synthetic
guggaagguccuaaauuau

SEQ ID NO: 8128 - RNA, 19 nt, Artificial Sequence
  Synthetic
uuacaaacgaggacacuga

SEQ ID NO: 8129 - RNA, 19 nt, Artificial Sequence
  Synthetic
acacugaugcacaaagauu

SEQ ID NO: 8130 - RNA, 19 nt, Artificial Sequence
  Synthetic
gggaagggcauaaagaauc

SEQ ID NO: 8131 - RNA, 19 nt, Artificial Sequence
  Synthetic
cagaaaggcugauuagcaa

SEQ ID NO: 8132 - RNA, 19 nt, Artificial Sequence
  Synthetic
caacaggauagcaaggaaa

SEQ ID NO: 8133 - RNA, 19 nt, Artificial Sequence
  Synthetic
ggagguaucugcaaggaau

SEQ ID NO: 8134 - RNA, 19 nt, Artificial Sequence
  Synthetic
ccuccuggguauugaagaa

SEQ ID NO: 8135 - RNA, 19 nt, Artificial Sequence
  Synthetic
ccaacaggauagcaaggaa

SEQ ID NO: 8136 - RNA, 19 nt, Artificial Sequence
  Synthetic
acacauacuucugcagaua

SEQ ID NO: 8137 - RNA, 19 nt, Artificial Sequence
  Synthetic
ccacguguauaauggaaau

SEQ ID NO: 8138 - RNA, 19 nt, Artificial Sequence
  Synthetic
uggcgggucuucagcgaua

SEQ ID NO: 8139 - RNA, 19 nt, Artificial Sequence
  Synthetic
ugaagaaccuggacuugaa

SEQ ID NO: 8140 - RNA, 19 nt, Artificial Sequence
  Synthetic
cuugccaguuucugagaua

SEQ ID NO: 8141 - RNA, 19 nt, Artificial Sequence
  Synthetic
acaauaaacaggaccuuuu

SEQ ID NO: 8142 - RNA, 19 nt, Artificial Sequence
  Synthetic
gggccgugauggacgugua

SEQ ID NO: 8143 - RNA, 19 nt, Artificial Sequence
  Synthetic
guaauuuccuugccaguuu

SEQ ID NO: 8144 - RNA, 19 nt, Artificial Sequence
  Synthetic
ccaguagaguggaucugua

SEQ ID NO: 8145 - RNA, 19 nt, Artificial Sequence
  Synthetic
gaaaggaggcuucccagua

SEQ ID NO: 8146 - RNA, 19 nt, Artificial Sequence
  Synthetic
aguuaggccuaucuacaaa

SEQ ID NO: 8147 - RNA, 19 nt, Artificial Sequence
  Synthetic
ggucaugaggucccagaga

SEQ ID NO: 8148 - RNA, 19 nt, Artificial Sequence
  Synthetic
caaggaauguauaaaguuc

SEQ ID NO: 8149 - RNA, 19 nt, Artificial Sequence
  Synthetic
ccagagagaccaugcaucu

SEQ ID NO: 8150 - RNA, 19 nt, Artificial Sequence
  Synthetic
gaggaaggcucaugaaagg

SEQ ID NO: 8151 - RNA, 19 nt, Artificial Sequence
  Synthetic
gcaaggaauguauaaaguu

SEQ ID NO: 8152 - RNA, 19 nt, Artificial Sequence
  Synthetic
acaugaaaguguauuguug

SEQ ID NO: 8153 - RNA, 19 nt, Artificial Sequence
  Synthetic
caaguuaggccuaucuaca

SEQ ID NO: 8154 - RNA, 19 nt, Artificial Sequence
  Synthetic
ggugcuuuguuuagagaug

SEQ ID NO: 8155 - RNA, 19 nt, Artificial Sequence
  Synthetic
gaaaggcugauuagcaaga

SEQ ID NO: 8156 - RNA, 19 nt, Artificial Sequence
  Synthetic
ggacuugaagcaggaggua

SEQ ID NO: 8157 - RNA, 19 nt, Artificial Sequence
  Synthetic
uagaguggaucuguaguua

SEQ ID NO: 8158 - RNA, 19 nt, Artificial Sequence
  Synthetic
aaaggaggcuucccaguau

SEQ ID NO: 8159 - RNA, 19 nt, Artificial Sequence
  Synthetic
guagaguggaucuguaguu

SEQ ID NO: 8160 - RNA, 19 nt, Artificial Sequence
  Synthetic
gaacaagcugcguaacugu

SEQ ID NO: 8161 - RNA, 19 nt, Artificial Sequence
  Synthetic
aaggaaaggugaugagcaa

SEQ ID NO: 8162 - RNA, 19 nt, Artificial Sequence
  Synthetic
ggaaaggugaugagcaaau

SEQ ID NO: 8163 - RNA, 19 nt, Artificial Sequence
  Synthetic
ggacaauggaagaguuaga

SEQ ID NO: 8164 - RNA, 19 nt, Artificial Sequence
  Synthetic
ccauauugccgaaaggauu

SEQ ID NO: 8165 - RNA, 19 nt, Artificial Sequence
  Synthetic
gauuuuaacuggacaacuu

SEQ ID NO: 8166 - RNA, 19 nt, Artificial Sequence
  Synthetic
ugacugagaugcaggccaa

SEQ ID NO: 8167 - RNA, 19 nt, Artificial Sequence
  Synthetic
ggccaagguugcagugaga

SEQ ID NO: 8168 - RNA, 19 nt, Artificial Sequence
  Synthetic
cagacaagcaggaucacaa

SEQ ID NO: 8169 - RNA, 19 nt, Artificial Sequence
  Synthetic
cagugaagcccaagagcca

SEQ ID NO: 8170 - RNA, 19 nt, Artificial Sequence
  Synthetic
gcacuuggaguuagaucua

SEQ ID NO: 8171 - RNA, 19 nt, Artificial Sequence
  Synthetic
gcaaauaaaggaacuucua

SEQ ID NO: 8172 - RNA, 19 nt, Artificial Sequence
  Synthetic
gcccaagagccaaaggaau

SEQ ID NO: 8173 - RNA, 19 nt, Artificial Sequence
  Synthetic
cagaaggcuuucaugagaa

SEQ ID NO: 8174 - RNA, 19 nt, Artificial Sequence
  Synthetic
gcagaaggcuuucaugaga

SEQ ID NO: 8175 - RNA, 19 nt, Artificial Sequence
  Synthetic
ccaauauccaggagcucaa

SEQ ID NO: 8176 - RNA, 19 nt, Artificial Sequence
  Synthetic
gagaggaaaggguaaauuu

SEQ ID NO: 8177 - RNA, 19 nt, Artificial Sequence
  Synthetic
gcaagaagcacuuaccaga

SEQ ID NO: 8178 - RNA, 19 nt, Artificial Sequence
  Synthetic
gugaagcccaagagccaaa

SEQ ID NO: 8179 - RNA, 19 nt, Artificial Sequence
  Synthetic
agaaggacaagaagccaua

SEQ ID NO: 8180 - RNA, 19 nt, Artificial Sequence
  Synthetic
gcaucuuccuucaguguau

SEQ ID NO: 8181 - RNA, 19 nt, Artificial Sequence
  Synthetic
cagaaugacaagaccuauu

SEQ ID NO: 8182 - RNA, 19 nt, Artificial Sequence
  Synthetic
cagcauuccagaaaggaga

SEQ ID NO: 8183 - RNA, 19 nt, Artificial Sequence
  Synthetic
ggaagaguuagaugccuua

SEQ ID NO: 8184 - RNA, 19 nt, Artificial Sequence
  Synthetic
uuacugaccuucugcuuaa

SEQ ID NO: 8185 - RNA, 19 nt, Artificial Sequence
  Synthetic
gagaaggacaagaagccau

SEQ ID NO: 8186 - RNA, 19 nt, Artificial Sequence
  Synthetic
uaggacaauggaagaguua

SEQ ID NO: 8187 - RNA, 19 nt, Artificial Sequence
  Synthetic
cccaagagccaaaggaauc

SEQ ID NO: 8188 - RNA, 19 nt, Artificial Sequence
  Synthetic
gguacaaguuccauccuga

SEQ ID NO: 8189 - RNA, 19 nt, Artificial Sequence
  Synthetic
auuccagaaaggagacuaa

SEQ ID NO: 8190 - RNA, 19 nt, Artificial Sequence
  Synthetic
acacaguugucgaagggca

SEQ ID NO: 8191 - RNA, 19 nt, Artificial Sequence
  Synthetic
ccgaaauggaugaacgauu

SEQ ID NO: 8192 - RNA, 19 nt, Artificial Sequence
  Synthetic
agaagaugcuggagaaacu

SEQ ID NO: 8193 - RNA, 19 nt, Artificial Sequence
  Synthetic
caggacaaucagagacaaa

SEQ ID NO: 8194 - RNA, 19 nt, Artificial Sequence
  Synthetic
gaacagaagaugcuggaga

SEQ ID NO: 8195 - RNA, 19 nt, Artificial Sequence
  Synthetic
agugaaaccaggcaggaaa

SEQ ID NO: 8196 - RNA, 19 nt, Artificial Sequence
  Synthetic
gaauaagaauggaacaguu

SEQ ID NO: 8197 - RNA, 19 nt, Artificial Sequence
  Synthetic
gggaggaguuagaguggca

SEQ ID NO: 8198 - RNA, 19 nt, Artificial Sequence
  Synthetic
cagacuaugagaagaggaa

SEQ ID NO: 8199 - RNA, 19 nt, Artificial Sequence
  Synthetic
agcaaauggaucagaacaa

SEQ ID NO: 8200 - RNA, 19 nt, Artificial Sequence
  Synthetic
cggcagaucaggagccaga

SEQ ID NO: 8201 - RNA, 19 nt, Artificial Sequence
  Synthetic
ugacggaguuagaagccaa

SEQ ID NO: 8202 - RNA, 19 nt, Artificial Sequence
  Synthetic
cagcagagcagcagccaga

SEQ ID NO: 8203 - RNA, 19 nt, Artificial Sequence
  Synthetic
aagagaagcagcagcgaga

SEQ ID NO: 8204 - RNA, 19 nt, Artificial Sequence
  Synthetic
aacagaagaugcuggagaa

SEQ ID NO: 8205 - RNA, 19 nt, Artificial Sequence
  Synthetic
ggaaacgccuggaguacca

SEQ ID NO: 8206 - RNA, 19 nt, Artificial Sequence
  Synthetic
cgggaaauccugacggagu

SEQ ID NO: 8207 - RNA, 19 nt, Artificial Sequence
  Synthetic
cgaaauggaugaacgauuc

SEQ ID NO: 8208 - RNA, 19 nt, Artificial Sequence
  Synthetic
ggaaguaagcaauggcaua

SEQ ID NO: 8209 - RNA, 19 nt, Artificial Sequence
  Synthetic
ggaaauggucuguacaaua

SEQ ID NO: 8210 - RNA, 19 nt, Artificial Sequence
  Synthetic
ccucaaacgucuaccauua

SEQ ID NO: 8211 - RNA, 19 nt, Artificial Sequence
  Synthetic
gaaagaaccugaaggaaca

SEQ ID NO: 8212 - RNA, 19 nt, Artificial Sequence
  Synthetic
ggaaucaauuucagagaau

SEQ ID NO: 8213 - RNA, 19 nt, Artificial Sequence
  Synthetic
gcacaaguauuuggagaaa

SEQ ID NO: 8214 - RNA, 19 nt, Artificial Sequence
  Synthetic
gggugacacuugauggaaa

SEQ ID NO: 8215 - RNA, 19 nt, Artificial Sequence
  Synthetic
ccacauuugaggagaagaa

SEQ ID NO: 8216 - RNA, 19 nt, Artificial Sequence
  Synthetic
ggauggacauaaagccaaa

SEQ ID NO: 8217 - RNA, 19 nt, Artificial Sequence
  Synthetic
ggauuuaccuuguucuaua

SEQ ID NO: 8218 - RNA, 19 nt, Artificial Sequence
  Synthetic
uagaauagcauguggcgaa

SEQ ID NO: 8219 - RNA, 19 nt, Artificial Sequence
  Synthetic
gggaaagaaauaaagaaga

SEQ ID NO: 8220 - RNA, 19 nt, Artificial Sequence
  Synthetic
guagauagcacaaguauuu

SEQ ID NO: 8221 - RNA, 19 nt, Artificial Sequence
  Synthetic
guaaauuugaagaggguca

SEQ ID NO: 8222 - RNA, 19 nt, Artificial Sequence
  Synthetic
ggucagauggcuuguuuua

SEQ ID NO: 8223 - RNA, 19 nt, Artificial Sequence
  Synthetic
aggaacaucucaugaauuu

SEQ ID NO: 8224 - RNA, 19 nt, Artificial Sequence
  Synthetic
ggguggugcacuuaagaaa

SEQ ID NO: 8225 - RNA, 19 nt, Artificial Sequence
  Synthetic
ucaugaggcuugugugcaa

SEQ ID NO: 8226 - RNA, 19 nt, Artificial Sequence
  Synthetic
cuuuacaaccuaaguguua

SEQ ID NO: 8227 - RNA, 19 nt, Artificial Sequence
  Synthetic
agaaagaaccugaaggaac

SEQ ID NO: 8228 - RNA, 19 nt, Artificial Sequence
  Synthetic
gaaaggaccaaaugccaaa

SEQ ID NO: 8229 - RNA, 19 nt, Artificial Sequence
  Synthetic
caauaugucaagaagagua

SEQ ID NO: 8230 - RNA, 19 nt, Artificial Sequence
  Synthetic
gcaaagaagauuaucaguu

SEQ ID NO: 8231 - RNA, 19 nt, Artificial Sequence
  Synthetic
ugaugaaggcaaagaagau

SEQ ID NO: 8232 - RNA, 19 nt, Artificial Sequence
  Synthetic
gcaugguguuagacaauuu

SEQ ID NO: 8233 - RNA, 19 nt, Artificial Sequence
  Synthetic
uauaaugccuacugaaaga

SEQ ID NO: 8234 - RNA, 19 nt, Artificial Sequence
  Synthetic
caucauauuugaagacagu

SEQ ID NO: 8235 - RNA, 19 nt, Artificial Sequence
  Synthetic
gaaauggucuguacaauau

SEQ ID NO: 8236 - RNA, 19 nt, Artificial Sequence
  Synthetic
aauuaaaggcagaaaggca

SEQ ID NO: 8237 - RNA, 19 nt, Artificial Sequence
  Synthetic
auucaagggaaguaagcaa

SEQ ID NO: 8238 - RNA, 19 nt, Artificial Sequence
  Synthetic
gcugaaaggucaacagaua

SEQ ID NO: 8239 - RNA, 19 nt, Artificial Sequence
  Synthetic
gcagaagaguguagaagaa

SEQ ID NO: 8240 - RNA, 19 nt, Artificial Sequence
  Synthetic
cauaaaggaugaagaggaa

SEQ ID NO: 8241 - RNA, 19 nt, Artificial Sequence
  Synthetic
cuacaaagaugaugugaau

SEQ ID NO: 8242 - RNA, 19 nt, Artificial Sequence
  Synthetic
agaagaagcuuuagcaauu

SEQ ID NO: 8243 - RNA, 19 nt, Artificial Sequence
  Synthetic
gauggaagcugaagaagaa

SEQ ID NO: 8244 - RNA, 19 nt, Artificial Sequence
  Synthetic
agaaauggcuugugcaaaa

SEQ ID NO: 8245 - RNA, 19 nt, Artificial Sequence
  Synthetic
gaagaguguagaagaaaua

SEQ ID NO: 8246 - RNA, 19 nt, Artificial Sequence
  Synthetic
gcaagaagaaguaguagaa

SEQ ID NO: 8247 - RNA, 19 nt, Artificial Sequence
  Synthetic
acuaagaggucaacaguau

SEQ ID NO: 8248 - RNA, 19 nt, Artificial Sequence
  Synthetic
gggcaugcuugaugaagaa

SEQ ID NO: 8249 - RNA, 19 nt, Artificial Sequence
  Synthetic
gcauaaaggaugaagagga

SEQ ID NO: 8250 - RNA, 19 nt, Artificial Sequence
  Synthetic
ggaugaucguccagaggaa

SEQ ID NO: 8251 - RNA, 19 nt, Artificial Sequence
  Synthetic
gaaggaaucaagagagcaa

SEQ ID NO: 8252 - RNA, 19 nt, Artificial Sequence
  Synthetic
caggagaguuucagggaca

SEQ ID NO: 8253 - RNA, 19 nt, Artificial Sequence
  Synthetic
ggcaguuggcagagaaaua

SEQ ID NO: 8254 - RNA, 19 nt, Artificial Sequence
  Synthetic
gaaucaaacuucagagacu

SEQ ID NO: 8255 - RNA, 19 nt, Artificial Sequence
  Synthetic
auuuugagguugagaguuu

SEQ ID NO: 8256 - RNA, 19 nt, Artificial Sequence
  Synthetic
gaacgaaugaucagggaga

SEQ ID NO: 8257 - RNA, 19 nt, Artificial Sequence
  Synthetic
agaguuuguuccagaaaua

SEQ ID NO: 8258 - RNA, 19 nt, Artificial Sequence
  Synthetic
aggcguagcucaaggauca

SEQ ID NO: 8259 - RNA, 19 nt, Artificial Sequence
  Synthetic
gagauggagaauaaagaaa

SEQ ID NO: 8260 - RNA, 19 nt, Artificial Sequence
  Synthetic
ccauauagcccugaggaaa

SEQ ID NO: 8261 - RNA, 19 nt, Artificial Sequence
  Synthetic
ggaaaaggauuaugugcua

SEQ ID NO: 8262 - RNA, 19 nt, Artificial Sequence
  Synthetic
ggacagaccuccaucaaga

SEQ ID NO: 8263 - RNA, 19 nt, Artificial Sequence
  Synthetic
gucgugagauggagaauaa

SEQ ID NO: 8264 - RNA, 19 nt, Artificial Sequence
  Synthetic
ugaagaagaagaagcuuua

SEQ ID NO: 8265 - RNA, 19 nt, Artificial Sequence
  Synthetic
aaacacaucuucugagcaa

SEQ ID NO: 8266 - RNA, 19 nt, Artificial Sequence
  Synthetic
agggagaaacugaaggcaa

SEQ ID NO: 8267 - RNA, 19 nt, Artificial Sequence
  Synthetic
gggagaaacugaaggcaac

SEQ ID NO: 8268 - RNA, 19 nt, Artificial Sequence
  Synthetic
agaaagaggucuagaagua

SEQ ID NO: 8269 - RNA, 19 nt, Artificial Sequence
  Synthetic
ggaaauccgacgugcaaua

SEQ ID NO: 8270 - RNA, 19 nt, Artificial Sequence
  Synthetic
gaagauaacuugaagauuc

SEQ ID NO: 8271 - RNA, 19 nt, Artificial Sequence
  Synthetic
uaggagaauuugagaaguu

SEQ ID NO: 8272 - RNA, 19 nt, Artificial Sequence
  Synthetic
gcaauauaguaguacauca

SEQ ID NO: 8273 - RNA, 19 nt, Artificial Sequence
  Synthetic
aggaggagcgccugauuaa

SEQ ID NO: 8274 - RNA, 19 nt, Artificial Sequence
  Synthetic
agugaucaaucuagaggaa

SEQ ID NO: 8275 - RNA, 19 nt, Artificial Sequence
  Synthetic
gcaacuaccaucacagaau

SEQ ID NO: 8276 - RNA, 19 nt, Artificial Sequence
  Synthetic
ugcaaagacuucaguuuua

SEQ ID NO: 8277 - RNA, 19 nt, Artificial Sequence
  Synthetic
ggagaauuugagaaguuua

SEQ ID NO: 8278 - RNA, 19 nt, Artificial Sequence
  Synthetic
agaagcaacuauuggacau

SEQ ID NO: 8279 - RNA, 19 nt, Artificial Sequence
  Synthetic
caaguuggugguugggaua

SEQ ID NO: 8280 - RNA, 19 nt, Artificial Sequence
  Synthetic
caacuuggaacgauggaau

SEQ ID NO: 8281 - RNA, 19 nt, Artificial Sequence
  Synthetic
agacacaaccucuuuauaa

SEQ ID NO: 8282 - RNA, 19 nt, Artificial Sequence
  Synthetic
ggaagaaacccaagacaaa

SEQ ID NO: 8283 - RNA, 19 nt, Artificial Sequence
  Synthetic
ggagauauguugugaaaga

SEQ ID NO: 8284 - RNA, 19 nt, Artificial Sequence
  Synthetic
cuauauaacccuaggaauu

SEQ ID NO: 8285 - RNA, 19 nt, Artificial Sequence
  Synthetic
gaagauaaagggaaagaua

SEQ ID NO: 8286 - RNA, 19 nt, Artificial Sequence
  Synthetic
gcaaagaagcuaaagaaaa

SEQ ID NO: 8287 - RNA, 19 nt, Artificial Sequence
  Synthetic
gggaagaaacccaagacaa

SEQ ID NO: 8288 - RNA, 19 nt, Artificial Sequence
  Synthetic
ugaagaagauccugaaauu

SEQ ID NO: 8289 - RNA, 19 nt, Artificial Sequence
  Synthetic
acaagaaagugaagacuau

SEQ ID NO: 8290 - RNA, 19 nt, Artificial Sequence
  Synthetic
agaugaagaugaugaggua

SEQ ID NO: 8291 - RNA, 19 nt, Artificial Sequence
  Synthetic
ucggaaagauggagcaaga

SEQ ID NO: 8292 - RNA, 19 nt, Artificial Sequence
  Synthetic
ccacaaaucugauaguauu

SEQ ID NO: 8293 - RNA, 19 nt, Artificial Sequence
  Synthetic
gccaagaagaugugaaaga

SEQ ID NO: 8294 - RNA, 19 nt, Artificial Sequence
  Synthetic
agggagauauguugugaaa

SEQ ID NO: 8295 - RNA, 19 nt, Artificial Sequence
  Synthetic
cagccaagaagaugugaaa

SEQ ID NO: 8296 - RNA, 19 nt, Artificial Sequence
  Synthetic
cauugaaccuugugugauu

SEQ ID NO: 8297 - RNA, 19 nt, Artificial Sequence
  Synthetic
gugcaaagaagcuaaagaa

SEQ ID NO: 8298 - RNA, 19 nt, Artificial Sequence
  Synthetic
guguagaauuugaaguuga

SEQ ID NO: 8299 - RNA, 19 nt, Artificial Sequence
  Synthetic
gaacaagagacccugguua

SEQ ID NO: 8300 - RNA, 19 nt, Artificial Sequence
  Synthetic
caaagaagagaguguggaa

SEQ ID NO: 8301 - RNA, 19 nt, Artificial Sequence
  Synthetic
ucagaagauuauagccuua

SEQ ID NO: 8302 - RNA, 19 nt, Artificial Sequence
  Synthetic
guggaauagugaauacuua

SEQ ID NO: 8303 - RNA, 19 nt, Artificial Sequence
  Synthetic
gauuauaugaugagaagca

SEQ ID NO: 8304 - RNA, 19 nt, Artificial Sequence
  Synthetic
ggagagugauacagauuca

SEQ ID NO: 8305 - RNA, 19 nt, Artificial Sequence
  Synthetic
gagaaagccaaacuggaaa

SEQ ID NO: 8306 - RNA, 19 nt, Artificial Sequence
  Synthetic
ugaauuaucuggugaacga

SEQ ID NO: 8307 - RNA, 19 nt, Artificial Sequence
  Synthetic
gauuauagccuuagugaag

SEQ ID NO: 8308 - RNA, 19 nt, Artificial Sequence
  Synthetic
gacaagaaagugaagacua

SEQ ID NO: 8309 - RNA, 19 nt, Artificial Sequence
  Synthetic
gccaguauauuaugacuaa

SEQ ID NO: 8310 - RNA, 19 nt, Artificial Sequence
  Synthetic
ugagaaagccaaacuggaa

SEQ ID NO: 8311 - RNA, 19 nt, Artificial Sequence
  Synthetic
ggaucuugaugcuggugua

SEQ ID NO: 8312 - RNA, 19 nt, Artificial Sequence
  Synthetic
gcaguuagguguuggaaua

SEQ ID NO: 8313 - RNA, 19 nt, Artificial Sequence
  Synthetic
gaagcaaagugcagaggaa

SEQ ID NO: 8314 - RNA, 19 nt, Artificial Sequence
  Synthetic
acaaacaagugaagaagua

SEQ ID NO: 8315 - RNA, 19 nt, Artificial Sequence
  Synthetic
cgucagagcuucuccguaa

SEQ ID NO: 8316 - RNA, 19 nt, Artificial Sequence
  Synthetic
aagugaagaaguagggaaa

SEQ ID NO: 8317 - RNA, 19 nt, Artificial Sequence
  Synthetic
agggaaaguaagugacaaa

SEQ ID NO: 8318 - RNA, 19 nt, Artificial Sequence
  Synthetic
uagagaagaugaagacuua

SEQ ID NO: 8319 - RNA, 19 nt, Artificial Sequence
  Synthetic
uuaaagaggucaugcacua

SEQ ID NO: 8320 - RNA, 19 nt, Artificial Sequence
  Synthetic
ugaacaaacaagugaagaa

SEQ ID NO: 8321 - RNA, 19 nt, Artificial Sequence
  Synthetic
caacugauuuacagacaaa

SEQ ID NO: 8322 - RNA, 19 nt, Artificial Sequence
  Synthetic
ccauguagcuuaugugaga

SEQ ID NO: 8323 - RNA, 19 nt, Artificial Sequence
  Synthetic
guggagaucuuuugggaga

SEQ ID NO: 8324 - RNA, 19 nt, Artificial Sequence
  Synthetic
caguggaauucuuggauuu

SEQ ID NO: 8325 - RNA, 19 nt, Artificial Sequence
  Synthetic
caagguagcuguaagaaaa

SEQ ID NO: 8326 - RNA, 19 nt, Artificial Sequence
  Synthetic
gaagaaguagggaaaguaa

SEQ ID NO: 8327 - RNA, 19 nt, Artificial Sequence
  Synthetic
acagaugacuugugguuuu

SEQ ID NO: 8328 - RNA, 19 nt, Artificial Sequence
  Synthetic
acaaugaagaacagaagua

SEQ ID NO: 8329 - RNA, 19 nt, Artificial Sequence
  Synthetic
ccuaaagaugcguauauaa

SEQ ID NO: 8330 - RNA, 19 nt, Artificial Sequence
  Synthetic
ugggagaacaguuagauaa

SEQ ID NO: 8331 - RNA, 19 nt, Artificial Sequence
  Synthetic
aggugauugaagugggaaa

SEQ ID NO: 8332 - RNA, 19 nt, Artificial Sequence
  Synthetic
cagagaacagauacagaaa

SEQ ID NO: 8333 - RNA, 19 nt, Artificial Sequence
  Synthetic
gguauauugugguggagau

SEQ ID NO: 8334 - RNA, 19 nt, Artificial Sequence
  Synthetic
guacugaaugcaagaaauu

SEQ ID NO: 8335 - RNA, 19 nt, Artificial Sequence
  Synthetic
gcagucagguacauaguua

SEQ ID NO: 8336 - RNA, 19 nt, Artificial Sequence
  Synthetic
aaauuuagcccaagaugaa

SEQ ID NO: 8337 - RNA, 19 nt, Artificial Sequence
  Synthetic
aagcaugggagaacaguua

SEQ ID NO: 8338 - RNA, 19 nt, Artificial Sequence
  Synthetic
ccacgagacgggaacauua

SEQ ID NO: 8339 - RNA, 19 nt, Artificial Sequence
  Synthetic
gugaagaaguagggaaagu

SEQ ID NO: 8340 - RNA, 19 nt, Artificial Sequence
  Synthetic
aguaauggcucaacugauu

SEQ ID NO: 8341 - RNA, 19 nt, Artificial Sequence
  Synthetic
uauuaagugccauggauua

SEQ ID NO: 8342 - RNA, 19 nt, Artificial Sequence
  Synthetic
agucagaguuuguggagaa

SEQ ID NO: 8343 - RNA, 19 nt, Artificial Sequence
  Synthetic
gugauaaugaugaaggaaa

SEQ ID NO: 8344 - RNA, 19 nt, Artificial Sequence
  Synthetic
ggauagaaguauuugugua

SEQ ID NO: 8345 - RNA, 19 nt, Artificial Sequence
  Synthetic
cugaagaagcugagaaaau

SEQ ID NO: 8346 - RNA, 19 nt, Artificial Sequence
  Synthetic
gagcaaacgcagagagaag

SEQ ID NO: 8347 - RNA, 19 nt, Artificial Sequence
  Synthetic
gcuacuggguggugauaau

SEQ ID NO: 8348 - RNA, 19 nt, Artificial Sequence
  Synthetic
gaaggaaggcccuggaaau

SEQ ID NO: 8349 - RNA, 19 nt, Artificial Sequence
  Synthetic
guacggagucguugcauaa

SEQ ID NO: 8350 - RNA, 19 nt, Artificial Sequence
  Synthetic
aggagaaggcagugagcuu

SEQ ID NO: 8351 - RNA, 19 nt, Artificial Sequence
  Synthetic
gggcagaucaggaaggcau

SEQ ID NO: 8352 - RNA, 19 nt, Artificial Sequence
  Synthetic
gaacgaacauguuagucaa

SEQ ID NO: 8353 - RNA, 19 nt, Artificial Sequence
  Synthetic
gcuucugucuugaggauau

SEQ ID NO: 8354 - RNA, 19 nt, Artificial Sequence
  Synthetic
gaauauuccacacaagaaa

SEQ ID NO: 8355 - RNA, 19 nt, Artificial Sequence
  Synthetic
gaccacuccucaagagaua

SEQ ID NO: 8356 - RNA, 19 nt, Artificial Sequence
  Synthetic
guucagaaauggaaauguu

SEQ ID NO: 8357 - RNA, 19 nt, Artificial Sequence
  Synthetic
ggauugggauagaaguauu

SEQ ID NO: 8358 - RNA, 19 nt, Artificial Sequence
  Synthetic
ucgagaaguucaaguucaa

SEQ ID NO: 8359 - RNA, 19 nt, Artificial Sequence
  Synthetic
ggaaaagacagcugcgaau

SEQ ID NO: 8360 - RNA, 19 nt, Artificial Sequence
  Synthetic
ggaacgaacauguuaguca

SEQ ID NO: 8361 - RNA, 19 nt, Artificial Sequence
  Synthetic
uggaacagcaggagcauuu

SEQ ID NO: 8362 - RNA, 19 nt, Artificial Sequence
  Synthetic
uggaggagcuggugcccua

SEQ ID NO: 8363 - RNA, 19 nt, Artificial Sequence
  Synthetic
cagaaauggaaauguucaa

SEQ ID NO: 8364 - RNA, 19 nt, Artificial Sequence
  Synthetic
ggccaugauucuuaagaga

SEQ ID NO: 8365 - RNA, 19 nt, Artificial Sequence
  Synthetic
gcacaaaguacuucucaga

SEQ ID NO: 8366 - RNA, 19 nt, Artificial Sequence
  Synthetic
gcauaugacacccgcguau

SEQ ID NO: 8367 - RNA, 19 nt, Artificial Sequence
  Synthetic
cgaggaagccccugagcaa

SEQ ID NO: 8368 - RNA, 19 nt, Artificial Sequence
  Synthetic
gagccaggccggugaagau

SEQ ID NO: 8369 - RNA, 19 nt, Artificial Sequence
  Synthetic
gggaacuucugcaggacau

SEQ ID NO: 8370 - RNA, 19 nt, Artificial Sequence
  Synthetic
ggguggugauaaugaugaa

SEQ ID NO: 8371 - RNA, 19 nt, Artificial Sequence
  Synthetic
gagaagagcacaaaguacu

SEQ ID NO: 8372 - RNA, 19 nt, Artificial Sequence
  Synthetic
ugagagcgaaggagaaaua

SEQ ID NO: 8373 - RNA, 19 nt, Artificial Sequence
  Synthetic
gaaauaaaccugacauguu

SEQ ID NO: 8374 - RNA, 19 nt, Artificial Sequence
  Synthetic
gggucugugcugagggcaa

SEQ ID NO: 8375 - RNA, 19 nt, Artificial Sequence
  Synthetic
acauguuggugcuuggaaa

SEQ ID NO: 8376 - RNA, 19 nt, Artificial Sequence
  Synthetic
gcagcaguucggcgagaua

SEQ ID NO: 8377 - RNA, 19 nt, Artificial Sequence
  Synthetic
acaagaaggugaccaucua

SEQ ID NO: 8378 - RNA, 19 nt, Artificial Sequence
  Synthetic
guugagagcgaaggagaaa

SEQ ID NO: 8379 - RNA, 19 nt, Artificial Sequence
  Synthetic
ggacccagagucagagaca

SEQ ID NO: 8380 - RNA, 19 nt, Artificial Sequence
  Synthetic
cagugaagcucugggacau

SEQ ID NO: 8381 - RNA, 19 nt, Artificial Sequence
  Synthetic
gcucugggcuggugacaac

SEQ ID NO: 8382 - RNA, 19 nt, Artificial Sequence
  Synthetic
ggguuucggccguaaguga

SEQ ID NO: 8383 - RNA, 19 nt, Artificial Sequence
  Synthetic
gagaaauaaaccugacaug

SEQ ID NO: 8384 - RNA, 19 nt, Artificial Sequence
  Synthetic
cuggagaccugucgcuaga

SEQ ID NO: 8385 - RNA, 19 nt, Artificial Sequence
  Synthetic
gagcgaaggagaaauaaac

SEQ ID NO: 8386 - RNA, 19 nt, Artificial Sequence
  Synthetic
ggagaaauaaaccugacau

SEQ ID NO: 8387 - RNA, 19 nt, Artificial Sequence
  Synthetic
uggaagagaagaacuuuga

SEQ ID NO: 8388 - RNA, 19 nt, Artificial Sequence
  Synthetic
ugacuggcaccuaugacaa

SEQ ID NO: 8389 - RNA, 19 nt, Artificial Sequence
  Synthetic
ugacccugcuggcggauga

SEQ ID NO: 8390 - RNA, 19 nt, Artificial Sequence
  Synthetic
gaagagaagaacuuugacu

SEQ ID NO: 8391 - RNA, 19 nt, Artificial Sequence
  Synthetic
caugacaaugggcucaaua

SEQ ID NO: 8392 - RNA, 19 nt, Artificial Sequence
  Synthetic
ggccacagcuuucccauca

SEQ ID NO: 8393 - RNA, 19 nt, Artificial Sequence
  Synthetic
gacaagaaggugaccaucu

SEQ ID NO: 8394 - RNA, 19 nt, Artificial Sequence
  Synthetic
gcccagcccuguugaagca

SEQ ID NO: 8395 - RNA, 19 nt, Artificial Sequence
  Synthetic
aaauaaaccugacauguug

SEQ ID NO: 8396 - RNA, 19 nt, Artificial Sequence
  Synthetic
cagcggaugggcagcaguu

SEQ ID NO: 8397 - RNA, 19 nt, Artificial Sequence
  Synthetic
aucaagaccuuaggcacua

SEQ ID NO: 8398 - RNA, 19 nt, Artificial Sequence
  Synthetic
agaaauaaaccugacaugu

SEQ ID NO: 8399 - RNA, 19 nt, Artificial Sequence
  Synthetic
cagcaguucggcgagauaa

SEQ ID NO: 8400 - RNA, 19 nt, Artificial Sequence
  Synthetic
gggcguggauguggauacu

SEQ ID NO: 8401 - RNA, 19 nt, Artificial Sequence
  Synthetic
gcgaaauaguacccaugag

SEQ ID NO: 8402 - RNA, 19 nt, Artificial Sequence
  Synthetic
acacugagcuguagggaaa

SEQ ID NO: 8403 - RNA, 19 nt, Artificial Sequence
  Synthetic
agaccuaggaggcggguuu

SEQ ID NO: 8404 - RNA, 19 nt, Artificial Sequence
  Synthetic
cccuggagcuucaaauaaa

SEQ ID NO: 8405 - RNA, 19 nt, Artificial Sequence
  Synthetic
ggacauuggccgaguacug

SEQ ID NO: 8406 - RNA, 19 nt, Artificial Sequence
  Synthetic
ccaaggccaaagcgagaaa

SEQ ID NO: 8407 - RNA, 19 nt, Artificial Sequence
  Synthetic
acgaauggcugucagacga

SEQ ID NO: 8408 - RNA, 19 nt, Artificial Sequence
  Synthetic
uagggaaacugaacuguga

SEQ ID NO: 8409 - RNA, 19 nt, Artificial Sequence
  Synthetic
ggccugacacugagcugua

SEQ ID NO: 8410 - RNA, 19 nt, Artificial Sequence
  Synthetic
gcaauagacagccgaugga

SEQ ID NO: 8411 - RNA, 19 nt, Artificial Sequence
  Synthetic
cgauggagccaccgaugga

SEQ ID NO: 8412 - RNA, 19 nt, Artificial Sequence
  Synthetic
gcucggaacugcccagaac

SEQ ID NO: 8413 - RNA, 19 nt, Artificial Sequence
  Synthetic
cacccuggagcuucaaaua

SEQ ID NO: 8414 - RNA, 19 nt, Artificial Sequence
  Synthetic
ucaggacauuggccgagua

SEQ ID NO: 8415 - RNA, 19 nt, Artificial Sequence
  Synthetic
ccaaagcgagaaaaucuua

SEQ ID NO: 8416 - RNA, 19 nt, Artificial Sequence
  Synthetic
ccuggagcuucaaauaaag

SEQ ID NO: 8417 - RNA, 19 nt, Artificial Sequence
  Synthetic
cgacacagcugcagggaaa

SEQ ID NO: 8418 - RNA, 19 nt, Artificial Sequence
  Synthetic
aaguaaagguguaagguuu

SEQ ID NO: 8419 - RNA, 19 nt, Artificial Sequence
  Synthetic
gaaagaggcuccugaagca

SEQ ID NO: 8420 - RNA, 19 nt, Artificial Sequence
  Synthetic
ggacauuccaaauaaagaa

SEQ ID NO: 8421 - RNA, 19 nt, Artificial Sequence
  Synthetic
gcagggaaaaucagagaua

SEQ ID NO: 8422 - RNA, 19 nt, Artificial Sequence
  Synthetic
uggcuuacauccuggaaau

SEQ ID NO: 8423 - RNA, 19 nt, Artificial Sequence
  Synthetic
cugggagaauuaagcauua

SEQ ID NO: 8424 - RNA, 19 nt, Artificial Sequence
  Synthetic
gagcuacucugguugguaa

SEQ ID NO: 8425 - RNA, 19 nt, Artificial Sequence
  Synthetic
ucagaagccugcagaauca

SEQ ID NO: 8426 - RNA, 19 nt, Artificial Sequence
  Synthetic
gaggauaauuggaaguucu

SEQ ID NO: 8427 - RNA, 19 nt, Artificial Sequence
  Synthetic
uaaagcaaguaaaggugua

SEQ ID NO: 8428 - RNA, 19 nt, Artificial Sequence
  Synthetic
agggaaagcuugccuucua

SEQ ID NO: 8429 - RNA, 19 nt, Artificial Sequence
  Synthetic
caucauugcugggagaauu

SEQ ID NO: 8430 - RNA, 19 nt, Artificial Sequence
  Synthetic
cuccaaagcuggugacuuc

SEQ ID NO: 8431 - RNA, 19 nt, Artificial Sequence
  Synthetic
caggagaggauaauuggaa

SEQ ID NO: 8432 - RNA, 19 nt, Artificial Sequence
  Synthetic
gagaaagacucacgagaaa

SEQ ID NO: 8433 - RNA, 19 nt, Artificial Sequence
  Synthetic
gagaaaagccaguggagaa

SEQ ID NO: 8434 - RNA, 19 nt, Artificial Sequence
  Synthetic
ggagaaagacucacgagaa

SEQ ID NO: 8435 - RNA, 19 nt, Artificial Sequence
  Synthetic
gaguaugguguuugcgaaa

SEQ ID NO: 8436 - RNA, 19 nt, Artificial Sequence
  Synthetic
gcuccaggaaugaggacua

SEQ ID NO: 8437 - RNA, 19 nt, Artificial Sequence
  Synthetic
cauaugagaugacgaggaa

SEQ ID NO: 8438 - RNA, 19 nt, Artificial Sequence
  Synthetic
gugagcggauagagugaua

SEQ ID NO: 8439 - RNA, 19 nt, Artificial Sequence
  Synthetic
cagcaugcacuuuggaaau

SEQ ID NO: 8440 - RNA, 19 nt, Artificial Sequence
  Synthetic
gcaccaagaucacgggcga

SEQ ID NO: 8441 - RNA, 19 nt, Artificial Sequence
  Synthetic
gaacauaagaauucccauu

SEQ ID NO: 8442 - RNA, 19 nt, Artificial Sequence
  Synthetic
gcagcaugcacuuuggaaa

SEQ ID NO: 8443 - RNA, 19 nt, Artificial Sequence
  Synthetic
uggaagaagcugagcaugu

SEQ ID NO: 8444 - RNA, 19 nt, Artificial Sequence
  Synthetic
acauccagauugugaagaa

SEQ ID NO: 8445 - RNA, 19 nt, Artificial Sequence
  Synthetic
ucgaugacccuaugagauu

SEQ ID NO: 8446 - RNA, 19 nt, Artificial Sequence
  Synthetic
cgcacgugcuucugauuaa

SEQ ID NO: 8447 - RNA, 19 nt, Artificial Sequence
  Synthetic
gauggaagaagcugagcau

SEQ ID NO: 8448 - RNA, 19 nt, Artificial Sequence
  Synthetic
gcauuagccuacaagcuuu

SEQ ID NO: 8449 - RNA, 19 nt, Artificial Sequence
  Synthetic
guagagagugugacauaga

SEQ ID NO: 8450 - RNA, 19 nt, Artificial Sequence
  Synthetic
gaagauucaccauuguuua

SEQ ID NO: 8451 - RNA, 19 nt, Artificial Sequence
  Synthetic
uagacugggucguguguga

SEQ ID NO: 8452 - RNA, 19 nt, Artificial Sequence
  Synthetic
aaagguuccuaaaugguaa

SEQ ID NO: 8453 - RNA, 19 nt, Artificial Sequence
  Synthetic
gagaccaaccugaggaugu

SEQ ID NO: 8454 - RNA, 19 nt, Artificial Sequence
  Synthetic
gagcggauagagugauaga

SEQ ID NO: 8455 - RNA, 19 nt, Artificial Sequence
  Synthetic
ucgucuggcuggagcugaa

SEQ ID NO: 8456 - RNA, 19 nt, Artificial Sequence
  Synthetic
gggcgugagcuccaggaau

SEQ ID NO: 8457 - RNA, 19 nt, Artificial Sequence
  Synthetic
uggcaaagguuccuaaaug

SEQ ID NO: 8458 - RNA, 19 nt, Artificial Sequence
  Synthetic
aggaugaguucuccaccaa

SEQ ID NO: 8459 - RNA, 19 nt, Artificial Sequence
  Synthetic
gugcauguacggccacaaa

SEQ ID NO: 8460 - RNA, 19 nt, Artificial Sequence
  Synthetic
agauugugaagaaggauga

SEQ ID NO: 8461 - RNA, 19 nt, Artificial Sequence
  Synthetic
caaaugaggcagucucuga

SEQ ID NO: 8462 - RNA, 19 nt, Artificial Sequence
  Synthetic
gcacaaaacugcaggaaca

SEQ ID NO: 8463 - RNA, 19 nt, Artificial Sequence
  Synthetic
agacauucauugugacuaa

SEQ ID NO: 8464 - RNA, 19 nt, Artificial Sequence
  Synthetic
ggaagaguguguucagaua

SEQ ID NO: 8465 - RNA, 19 nt, Artificial Sequence
  Synthetic
cuaaauggguguacaaaga

SEQ ID NO: 8466 - RNA, 19 nt, Artificial Sequence
  Synthetic
ggcaagauguucucaauua

SEQ ID NO: 8467 - RNA, 19 nt, Artificial Sequence
  Synthetic
gcaagauguucucaauuaa

SEQ ID NO: 8468 - RNA, 19 nt, Artificial Sequence
  Synthetic
auuaagaaccuuugcacaa

SEQ ID NO: 8469 - RNA, 19 nt, Artificial Sequence
  Synthetic
gauaacagauagcacauua

SEQ ID NO: 8470 - RNA, 19 nt, Artificial Sequence
  Synthetic
gccgaguaguggagaauau

SEQ ID NO: 8471 - RNA, 19 nt, Artificial Sequence
  Synthetic
gcacgcagcuagaagauga

SEQ ID NO: 8472 - RNA, 19 nt, Artificial Sequence
  Synthetic
cugcaggaacauugaagua

SEQ ID NO: 8473 - RNA, 19 nt, Artificial Sequence
  Synthetic
gaacauugaaguacugaau

SEQ ID NO: 8474 - RNA, 19 nt, Artificial Sequence
  Synthetic
uuugauuuccagagggaua

SEQ ID NO: 8475 - RNA, 19 nt, Artificial Sequence
  Synthetic
cuaaagagcuucuaugcuu

SEQ ID NO: 8476 - RNA, 19 nt, Artificial Sequence
  Synthetic
gcccugaacuggugacuuu

SEQ ID NO: 8477 - RNA, 19 nt, Artificial Sequence
  Synthetic
cuaaaugguugccuugaaa

SEQ ID NO: 8478 - RNA, 19 nt, Artificial Sequence
  Synthetic
aaauagugaugaagcugua

SEQ ID NO: 8479 - RNA, 19 nt, Artificial Sequence
  Synthetic
gggcuggaaucaagagacu

SEQ ID NO: 8480 - RNA, 19 nt, Artificial Sequence
  Synthetic
guucucaaauagugaugaa

SEQ ID NO: 8481 - RNA, 19 nt, Artificial Sequence
  Synthetic
ccacacauacauacacaua

SEQ ID NO: 8482 - RNA, 19 nt, Artificial Sequence
  Synthetic
acacauacauacacauaca

SEQ ID NO: 8483 - RNA, 19 nt, Artificial Sequence
  Synthetic
cgaacugaguauuuaauga

SEQ ID NO: 8484 - RNA, 19 nt, Artificial Sequence
  Synthetic
ggauggcauucaagcacua

SEQ ID NO: 8485 - RNA, 19 nt, Artificial Sequence
  Synthetic
ccuaaaugguugccuugaa

SEQ ID NO: 8486 - RNA, 19 nt, Artificial Sequence
  Synthetic
guuaagucuucguggaugu

SEQ ID NO: 8487 - RNA, 19 nt, Artificial Sequence
  Synthetic
aaucuaaauggguguacaa

SEQ ID NO: 8488 - RNA, 19 nt, Artificial Sequence
  Synthetic
auauuaaaguccacgccua

SEQ ID NO: 8489 - RNA, 19 nt, Artificial Sequence
  Synthetic
ucucauuacuauaugcaga

SEQ ID NO: 8490 - RNA, 19 nt, Artificial Sequence
  Synthetic
agugggagacaaugcauua

SEQ ID NO: 8491 - RNA, 19 nt, Artificial Sequence
  Synthetic
gcccagagguuuccuaaau

SEQ ID NO: 8492 - RNA, 19 nt, Artificial Sequence
  Synthetic
ggacaauacauuagaggaa

SEQ ID NO: 8493 - RNA, 19 nt, Artificial Sequence
  Synthetic
ggaaacacuuggugaaaga

SEQ ID NO: 8494 - RNA, 19 nt, Artificial Sequence
  Synthetic
caaccaaguucaugagaca

SEQ ID NO: 8495 - RNA, 19 nt, Artificial Sequence
  Synthetic
gagacaaauccauuagaaa

SEQ ID NO: 8496 - RNA, 19 nt, Artificial Sequence
  Synthetic
gagagcaagacaugggaaa

SEQ ID NO: 8497 - RNA, 19 nt, Artificial Sequence
  Synthetic
gguuaagugucucaauaaa

SEQ ID NO: 8498 - RNA, 19 nt, Artificial Sequence
  Synthetic
augcauggcuaauaaguua

SEQ ID NO: 8499 - RNA, 19 nt, Artificial Sequence
  Synthetic
ucaacgaucucaugauaaa

SEQ ID NO: 8500 - RNA, 19 nt, Artificial Sequence
  Synthetic
ugaagaaggugaugaaaau

SEQ ID NO: 8501 - RNA, 19 nt, Artificial Sequence
  Synthetic
acaauguaguaaaggguuu

SEQ ID NO: 8502 - RNA, 19 nt, Artificial Sequence
  Synthetic
augacaagauggcgacuaa

SEQ ID NO: 8503 - RNA, 19 nt, Artificial Sequence
  Synthetic
gaaucugaauuuuggaaga

SEQ ID NO: 8504 - RNA, 19 nt, Artificial Sequence
  Synthetic
ggguuaagugucucaauaa

SEQ ID NO: 8505 - RNA, 19 nt, Artificial Sequence
  Synthetic
ugaauaaaugcauggcuaa

SEQ ID NO: 8506 - RNA, 19 nt, Artificial Sequence
  Synthetic
agaugaagaaggugaugaa

SEQ ID NO: 8507 - RNA, 19 nt, Artificial Sequence
  Synthetic
guaaaggguaucugaucaa

SEQ ID NO: 8508 - RNA, 19 nt, Artificial Sequence
  Synthetic
cuauaucuguaaaggguau

SEQ ID NO: 8509 - RNA, 19 nt, Artificial Sequence
  Synthetic
gaaaguagaugaagaaggu

SEQ ID NO: 8510 - RNA, 19 nt, Artificial Sequence
  Synthetic
caagaauugauuucgguua

SEQ ID NO: 8511 - RNA, 19 nt, Artificial Sequence
  Synthetic
ccaacaacagugacggaau

SEQ ID NO: 8512 - RNA, 19 nt, Artificial Sequence
  Synthetic
uuuacgaaauaaugggcaa

SEQ ID NO: 8513 - RNA, 19 nt, Artificial Sequence
  Synthetic
augaagaaggugaugaaaa

SEQ ID NO: 8514 - RNA, 19 nt, Artificial Sequence
  Synthetic
cagaagugacccacaaauu

SEQ ID NO: 8515 - RNA, 19 nt, Artificial Sequence
  Synthetic
aaaggaaacacuuggugaa

SEQ ID NO: 8516 - RNA, 19 nt, Artificial Sequence
  Synthetic
ggacaagaugauacuucaa

SEQ ID NO: 8517 - RNA, 19 nt, Artificial Sequence
  Synthetic
acaaauugcuaucugucua

SEQ ID NO: 8518 - RNA, 19 nt, Artificial Sequence
  Synthetic
gacaauacauuagaggaaa

SEQ ID NO: 8519 - RNA, 19 nt, Artificial Sequence
  Synthetic
aaguagaugaagaagguga

SEQ ID NO: 8520 - RNA, 19 nt, Artificial Sequence
  Synthetic
gaauaaaugcauggcuaau

SEQ ID NO: 8521 - RNA, 19 nt, Artificial Sequence
  Synthetic
ugacaaaccgaaaguagau

SEQ ID NO: 8522 - RNA, 19 nt, Artificial Sequence
  Synthetic
cagcaagacauaagaguaa

SEQ ID NO: 8523 - RNA, 19 nt, Artificial Sequence
  Synthetic
gcgagaaagugaagucaaa

SEQ ID NO: 8524 - RNA, 19 nt, Artificial Sequence
  Synthetic
agacauagcucguacaaau

SEQ ID NO: 8525 - RNA, 19 nt, Artificial Sequence
  Synthetic
cggaauacagcaagacaua

SEQ ID NO: 8526 - RNA, 19 nt, Artificial Sequence
  Synthetic
uugcaaagguggcguuuaa

SEQ ID NO: 8527 - RNA, 19 nt, Artificial Sequence
  Synthetic
gcucaaagaaugucaucua

SEQ ID NO: 8528 - RNA, 19 nt, Artificial Sequence
  Synthetic
gcacaaauauuuccaagaa

SEQ ID NO: 8529 - RNA, 19 nt, Artificial Sequence
  Synthetic
gaagaugagcugauauuaa

SEQ ID NO: 8530 - RNA, 19 nt, Artificial Sequence
  Synthetic
guuuaaaugugcugcguuu

SEQ ID NO: 8531 - RNA, 19 nt, Artificial Sequence
  Synthetic
ggauaagagagcuaaauuu

SEQ ID NO: 8532 - RNA, 19 nt, Artificial Sequence
  Synthetic
gauaauauguggucaaguu

SEQ ID NO: 8533 - RNA, 19 nt, Artificial Sequence
  Synthetic
gcaaacagcugcacuggaa

SEQ ID NO: 8534 - RNA, 19 nt, Artificial Sequence
  Synthetic
uuacagagcuugacaacau

SEQ ID NO: 8535 - RNA, 19 nt, Artificial Sequence
  Synthetic
gggcugaagacgcugauua

SEQ ID NO: 8536 - RNA, 19 nt, Artificial Sequence
  Synthetic
guucacagacaaaggcuua

SEQ ID NO: 8537 - RNA, 19 nt, Artificial Sequence
  Synthetic
gagaaagugaagucaaauu

SEQ ID NO: 8538 - RNA, 19 nt, Artificial Sequence
  Synthetic
gagcuaaauuuaagcaacu

SEQ ID NO: 8539 - RNA, 19 nt, Artificial Sequence
  Synthetic
gcacuagucaccuaagaua

SEQ ID NO: 8540 - RNA, 19 nt, Artificial Sequence
  Synthetic
gcucacugaucuuggaaca

SEQ ID NO: 8541 - RNA, 19 nt, Artificial Sequence
  Synthetic
ccaucugccuggaggucua

SEQ ID NO: 8542 - RNA, 19 nt, Artificial Sequence
  Synthetic
ggugaagcacuguguggaa

SEQ ID NO: 8543 - RNA, 19 nt, Artificial Sequence
  Synthetic
gugaagcacuguguggaaa

SEQ ID NO: 8544 - RNA, 19 nt, Artificial Sequence
  Synthetic
acgacaccuuuguggacua

SEQ ID NO: 8545 - RNA, 19 nt, Artificial Sequence
  Synthetic
cugucgaggcugcaacaaa

SEQ ID NO: 8546 - RNA, 19 nt, Artificial Sequence
  Synthetic
agcaggagcuggugaagca

SEQ ID NO: 8547 - RNA, 19 nt, Artificial Sequence
  Synthetic
caaagaugagagugcacau

SEQ ID NO: 8548 - RNA, 19 nt, Artificial Sequence
  Synthetic
gcgccaacuuccugcagca

SEQ ID NO: 8549 - RNA, 19 nt, Artificial Sequence
  Synthetic
ugucgaggcugcaacaaaa

SEQ ID NO: 8550 - RNA, 19 nt, Artificial Sequence
  Synthetic
gcuacaagagcgccaacuu

SEQ ID NO: 8551 - RNA, 19 nt, Artificial Sequence
  Synthetic
agaagcagcucucauccua

SEQ ID NO: 8552 - RNA, 19 nt, Artificial Sequence
  Synthetic
agaugagagugcacauuuc

SEQ ID NO: 8553 - RNA, 19 nt, Artificial Sequence
  Synthetic
aagaugagagugcacauuu

SEQ ID NO: 8554 - RNA, 19 nt, Artificial Sequence
  Synthetic
gacacaaguucuccuacga

SEQ ID NO: 8555 - RNA, 19 nt, Artificial Sequence
  Synthetic
cuacaagagcgccaacuuc

SEQ ID NO: 8556 - RNA, 19 nt, Artificial Sequence
  Synthetic
aagcagcucucauccuaca

SEQ ID NO: 8557 - RNA, 19 nt, Artificial Sequence
  Synthetic
aaagaugagagugcacauu

SEQ ID NO: 8558 - RNA, 19 nt, Artificial Sequence
  Synthetic
gcagcucucauccuacaaa

SEQ ID NO: 8559 - RNA, 19 nt, Artificial Sequence
  Synthetic
aggagcagauggccaacug

SEQ ID NO: 8560 - RNA, 19 nt, Artificial Sequence
  Synthetic
uuuguggacuacaguauug

SEQ ID NO: 8561 - RNA, 19 nt, Artificial Sequence
  Synthetic
gcucuggcccugucucucu

SEQ ID NO: 8562 - RNA, 19 nt, Artificial Sequence
  Synthetic
gaagcacuguguggaaagc

SEQ ID NO: 8563 - RNA, 19 nt, Artificial Sequence
  Synthetic
gaugagagugcacauuucg

SEQ ID NO: 8564 - RNA, 19 nt, Artificial Sequence
  Synthetic
guucuccuacgacaccuuu

SEQ ID NO: 8565 - RNA, 19 nt, Artificial Sequence
  Synthetic
gaagguccaggagcagaug

SEQ ID NO: 8566 - RNA, 19 nt, Artificial Sequence
  Synthetic
augaagagcugaaggaaau

SEQ ID NO: 8567 - RNA, 19 nt, Artificial Sequence
  Synthetic
gagcugaaugagagaauaa

SEQ ID NO: 8568 - RNA, 19 nt, Artificial Sequence
  Synthetic
agaaguaagaccaaagaaa

SEQ ID NO: 8569 - RNA, 19 nt, Artificial Sequence
  Synthetic
caugaagagcugaaggaaa

SEQ ID NO: 8570 - RNA, 19 nt, Artificial Sequence
  Synthetic
gguauagggcuguggauau

SEQ ID NO: 8571 - RNA, 19 nt, Artificial Sequence
  Synthetic
ggacuaaauuggugguugu

SEQ ID NO: 8572 - RNA, 19 nt, Artificial Sequence
  Synthetic
guucaaaacuguccagaaa

SEQ ID NO: 8573 - RNA, 19 nt, Artificial Sequence
  Synthetic
guaaaguguaugugcaauu

SEQ ID NO: 8574 - RNA, 19 nt, Artificial Sequence
  Synthetic
gaaguaagaccaaagaaaa

SEQ ID NO: 8575 - RNA, 19 nt, Artificial Sequence
  Synthetic
ugaagaagacgaccagaua

SEQ ID NO: 8576 - RNA, 19 nt, Artificial Sequence
  Synthetic
ggagagggaagaacagaau

SEQ ID NO: 8577 - RNA, 19 nt, Artificial Sequence
  Synthetic
ggacaggugacuauuuaua

SEQ ID NO: 8578 - RNA, 19 nt, Artificial Sequence
  Synthetic
gaagaagacgaccagauaa

SEQ ID NO: 8579 - RNA, 19 nt, Artificial Sequence
  Synthetic
gcaaacagcacuuuacaga

SEQ ID NO: 8580 - RNA, 19 nt, Artificial Sequence
  Synthetic
ugggagaaguugcagauga

SEQ ID NO: 8581 - RNA, 19 nt, Artificial Sequence
  Synthetic
gaucaugugcucagugaca

SEQ ID NO: 8582 - RNA, 19 nt, Artificial Sequence
  Synthetic
agaggacguuagugcauua

SEQ ID NO: 8583 - RNA, 19 nt, Artificial Sequence
  Synthetic
agauuaagguagagaguga

SEQ ID NO: 8584 - RNA, 19 nt, Artificial Sequence
  Synthetic
gcacuugaguaaagauaaa

SEQ ID NO: 8585 - RNA, 19 nt, Artificial Sequence
  Synthetic
gggaaugagugaaacuaaa

SEQ ID NO: 8586 - RNA, 19 nt, Artificial Sequence
  Synthetic
guuaauagcugaaguccua

SEQ ID NO: 8587 - RNA, 19 nt, Artificial Sequence
  Synthetic
gaguaaagauaaagaguag

SEQ ID NO: 8588 - RNA, 19 nt, Artificial Sequence
  Synthetic
gaaucaaagcuguuguaua

SEQ ID NO: 8589 - RNA, 19 nt, Artificial Sequence
  Synthetic
ugaaauauggucaggacaa

SEQ ID NO: 8590 - RNA, 19 nt, Artificial Sequence
  Synthetic
agaaagggaugaagguaca

SEQ ID NO: 8591 - RNA, 19 nt, Artificial Sequence
  Synthetic
ccauaaaccaguucaagaa

SEQ ID NO: 8592 - RNA, 19 nt, Artificial Sequence
  Synthetic
gagccugagugaugguuua

SEQ ID NO: 8593 - RNA, 19 nt, Artificial Sequence
  Synthetic
gguagaaccaggaaucaaa

SEQ ID NO: 8594 - RNA, 19 nt, Artificial Sequence
  Synthetic
gaaauauggucaggacaaa

SEQ ID NO: 8595 - RNA, 19 nt, Artificial Sequence
  Synthetic
uaagguagagagugaaaua

SEQ ID NO: 8596 - RNA, 19 nt, Artificial Sequence
  Synthetic
acaaauugcugcugcuuuu

SEQ ID NO: 8597 - RNA, 19 nt, Artificial Sequence
  Synthetic
gaauuuagagccugaguga

SEQ ID NO: 8598 - RNA, 19 nt, Artificial Sequence
  Synthetic
gguaacaugcagaugauuu

SEQ ID NO: 8599 - RNA, 19 nt, Artificial Sequence
  Synthetic
ccacaaugccucuagcuau

SEQ ID NO: 8600 - RNA, 19 nt, Artificial Sequence
  Synthetic
ccuguguuguuaagugaua

SEQ ID NO: 8601 - RNA, 19 nt, Artificial Sequence
  Synthetic
gaagauaagaguucacuga

SEQ ID NO: 8602 - RNA, 19 nt, Artificial Sequence
  Synthetic
guaaagauaaagaguagga

SEQ ID NO: 8603 - RNA, 19 nt, Artificial Sequence
  Synthetic
gugaugguuuaguggauuu

SEQ ID NO: 8604 - RNA, 19 nt, Artificial Sequence
  Synthetic
acuaauaaguggagaggaa

SEQ ID NO: 8605 - RNA, 19 nt, Artificial Sequence
  Synthetic
cggugaagaagaagagaaa

SEQ ID NO: 8606 - RNA, 19 nt, Artificial Sequence
  Synthetic
ggaagaugccggugaagaa

SEQ ID NO: 8607 - RNA, 19 nt, Artificial Sequence
  Synthetic
aagaaugguuaaagggaau

SEQ ID NO: 8608 - RNA, 19 nt, Artificial Sequence
  Synthetic
gaagaaugguuaaagggaa

SEQ ID NO: 8609 - RNA, 19 nt, Artificial Sequence
  Synthetic
caaucaaaguaucguguua

SEQ ID NO: 8610 - RNA, 19 nt, Artificial Sequence
  Synthetic
gcaagaacuaugugaagaa

SEQ ID NO: 8611 - RNA, 19 nt, Artificial Sequence
  Synthetic
gugaagaagaagagaaaau

SEQ ID NO: 8612 - RNA, 19 nt, Artificial Sequence
  Synthetic
gaacaaagaucaaugguac

SEQ ID NO: 8613 - RNA, 19 nt, Artificial Sequence
  Synthetic
cguggaaauuggaggcuga

SEQ ID NO: 8614 - RNA, 19 nt, Artificial Sequence
  Synthetic
gggauaaagaucagagaag

SEQ ID NO: 8615 - RNA, 19 nt, Artificial Sequence
  Synthetic
ugaugaaguuguagggcca

SEQ ID NO: 8616 - RNA, 19 nt, Artificial Sequence
  Synthetic
gcacagaaaaguuacaaaa

SEQ ID NO: 8617 - RNA, 19 nt, Artificial Sequence
  Synthetic
gcucacaguugaaugauau

SEQ ID NO: 8618 - RNA, 19 nt, Artificial Sequence
  Synthetic
ucagagaagccuugauauu

SEQ ID NO: 8619 - RNA, 19 nt, Artificial Sequence
  Synthetic
uggcuugguuuuaugaaua

SEQ ID NO: 8620 - RNA, 19 nt, Artificial Sequence
  Synthetic
guauuagaauucagcagaa

SEQ ID NO: 8621 - RNA, 19 nt, Artificial Sequence
  Synthetic
agaaagacgacgaggauac

SEQ ID NO: 8622 - RNA, 19 nt, Artificial Sequence
  Synthetic
cagauaugccuuugauuuu

SEQ ID NO: 8623 - RNA, 19 nt, Artificial Sequence
  Synthetic
cagcagcaguagcggaaga

SEQ ID NO: 8624 - RNA, 19 nt, Artificial Sequence
  Synthetic
gggccagaaggaauggaaa

SEQ ID NO: 8625 - RNA, 19 nt, Artificial Sequence
  Synthetic
ggccagaaggaauggaaaa

SEQ ID NO: 8626 - RNA, 19 nt, Artificial Sequence
  Synthetic
agagaaagacgacgaggau

SEQ ID NO: 8627 - RNA, 19 nt, Artificial Sequence
  Synthetic
gcugaaagcaugggauuuu

SEQ ID NO: 8628 - RNA, 19 nt, Artificial Sequence
  Synthetic
agacauugguguugaaccu

SEQ ID NO: 8629 - RNA, 19 nt, Artificial Sequence
  Synthetic
uaauaaguggagaggaaca

SEQ ID NO: 8630 - RNA, 19 nt, Artificial Sequence
  Synthetic
ccggugaagaagaagagaa

SEQ ID NO: 8631 - RNA, 19 nt, Artificial Sequence
  Synthetic
gagaaagacgacgaggaua

SEQ ID NO: 8632 - RNA, 19 nt, Artificial Sequence
  Synthetic
agagaagccuugauauuga

SEQ ID NO: 8633 - RNA, 19 nt, Artificial Sequence
  Synthetic
aggcugaaagcaugggauu

SEQ ID NO: 8634 - RNA, 19 nt, Artificial Sequence
  Synthetic
gcucaaagguggaguacua

SEQ ID NO: 8635 - RNA, 19 nt, Artificial Sequence
  Synthetic
gagaaacggcggagaacaa

SEQ ID NO: 8636 - RNA, 19 nt, Artificial Sequence
  Synthetic
ggagaacaauugaggauuu

SEQ ID NO: 8637 - RNA, 19 nt, Artificial Sequence
  Synthetic
cugaagaggaggaggaaga

SEQ ID NO: 8638 - RNA, 19 nt, Artificial Sequence
  Synthetic
gcaagaagcggaaguuaaa

SEQ ID NO: 8639 - RNA, 19 nt, Artificial Sequence
  Synthetic
ggaagaggaagaagaagaa

SEQ ID NO: 8640 - RNA, 19 nt, Artificial Sequence
  Synthetic
gcaaagucauccaagagaa

SEQ ID NO: 8641 - RNA, 19 nt, Artificial Sequence
  Synthetic
ccagagaaacggcggagaa

SEQ ID NO: 8642 - RNA, 19 nt, Artificial Sequence
  Synthetic
cgaaagaaggaccgaaaga

SEQ ID NO: 8643 - RNA, 19 nt, Artificial Sequence
  Synthetic
ggaggaagaggaagaagaa

SEQ ID NO: 8644 - RNA, 19 nt, Artificial Sequence
  Synthetic
gaaaagagaucucgaauca

SEQ ID NO: 8645 - RNA, 19 nt, Artificial Sequence
  Synthetic
ggaagaagaagaagagaug

SEQ ID NO: 8646 - RNA, 19 nt, Artificial Sequence
  Synthetic
gcaguuuuguuuuggcaua

SEQ ID NO: 8647 - RNA, 19 nt, Artificial Sequence
  Synthetic
aagaggaggaagaggaaga

SEQ ID NO: 8648 - RNA, 19 nt, Artificial Sequence
  Synthetic
agcaagaagcggaaguuaa

SEQ ID NO: 8649 - RNA, 19 nt, Artificial Sequence
  Synthetic
aggaagaagaagaagagau

SEQ ID NO: 8650 - RNA, 19 nt, Artificial Sequence
  Synthetic
gcggagaacaauugaggau

SEQ ID NO: 8651 - RNA, 19 nt, Artificial Sequence
  Synthetic
gaagaagaagagauggcaa

SEQ ID NO: 8652 - RNA, 19 nt, Artificial Sequence
  Synthetic
cgaaucaagaagagcaaga

SEQ ID NO: 8653 - RNA, 19 nt, Artificial Sequence
  Synthetic
cuaccuugcuugagaagau

SEQ ID NO: 8654 - RNA, 19 nt, Artificial Sequence
  Synthetic
ggacaucaugguagaauca

SEQ ID NO: 8655 - RNA, 19 nt, Artificial Sequence
  Synthetic
aggaagaggaggaagagga

SEQ ID NO: 8656 - RNA, 19 nt, Artificial Sequence
  Synthetic
aggaggaagaggaagaaga

SEQ ID NO: 8657 - RNA, 19 nt, Artificial Sequence
  Synthetic
caagagaagggcagcucaa

SEQ ID NO: 8658 - RNA, 19 nt, Artificial Sequence
  Synthetic
aggaggaggaagaggagga

SEQ ID NO: 8659 - RNA, 19 nt, Artificial Sequence
  Synthetic
cucgaaagaaggaccgaaa

SEQ ID NO: 8660 - RNA, 19 nt, Artificial Sequence
  Synthetic
aagaggaagaagaagaaga

SEQ ID NO: 8661 - RNA, 19 nt, Artificial Sequence
  Synthetic
gaagauggcuccugaaaua

SEQ ID NO: 8662 - RNA, 19 nt, Artificial Sequence
  Synthetic
agauaaagguugucagauu

SEQ ID NO: 8663 - RNA, 19 nt, Artificial Sequence
  Synthetic
ggauauugggagcaaguaa

SEQ ID NO: 8664 - RNA, 19 nt, Artificial Sequence
  Synthetic
ggaagaggauguuggacuu

SEQ ID NO: 8665 - RNA, 19 nt, Artificial Sequence
  Synthetic
gcaaguaagucacccaaua

SEQ ID NO: 8666 - RNA, 19 nt, Artificial Sequence
  Synthetic
cggaacagauguauaguga

SEQ ID NO: 8667 - RNA, 19 nt, Artificial Sequence
  Synthetic
uauaauagcucgucagcau

SEQ ID NO: 8668 - RNA, 19 nt, Artificial Sequence
  Synthetic
gaacagauguauagugauc

SEQ ID NO: 8669 - RNA, 19 nt, Artificial Sequence
  Synthetic
gauaaagguugucagauuu

SEQ ID NO: 8670 - RNA, 19 nt, Artificial Sequence
  Synthetic
ggguacagauagugaaugu

SEQ ID NO: 8671 - RNA, 19 nt, Artificial Sequence
  Synthetic
gaucauuacaguacaguau

SEQ ID NO: 8672 - RNA, 19 nt, Artificial Sequence
  Synthetic
ccuccaaguucuuaaugaa

SEQ ID NO: 8673 - RNA, 19 nt, Artificial Sequence
  Synthetic
aaauagauguggcaagaga

SEQ ID NO: 8674 - RNA, 19 nt, Artificial Sequence
  Synthetic
ggaagcagauacaguuauu

SEQ ID NO: 8675 - RNA, 19 nt, Artificial Sequence
  Synthetic
ucacaaagcuguucaugga

SEQ ID NO: 8676 - RNA, 19 nt, Artificial Sequence
  Synthetic
caaguaagucacccaauaa

SEQ ID NO: 8677 - RNA, 19 nt, Artificial Sequence
  Synthetic
gaagcuucccuuaguauua

SEQ ID NO: 8678 - RNA, 19 nt, Artificial Sequence
  Synthetic
caaagcuguucauggaaga

SEQ ID NO: 8679 - RNA, 19 nt, Artificial Sequence
  Synthetic
agaaagagagugagagaga

SEQ ID NO: 8680 - RNA, 19 nt, Artificial Sequence
  Synthetic
ccagagagccagagaguga

SEQ ID NO: 8681 - RNA, 19 nt, Artificial Sequence
  Synthetic
agagaaagagagagagaga

SEQ ID NO: 8682 - RNA, 19 nt, Artificial Sequence
  Synthetic
agagagagaaagagagaga

SEQ ID NO: 8683 - RNA, 19 nt, Artificial Sequence
  Synthetic
gagagaugcuguugaauca

SEQ ID NO: 8684 - RNA, 19 nt, Artificial Sequence
  Synthetic
agagaaagagagugagaga

SEQ ID NO: 8685 - RNA, 19 nt, Artificial Sequence
  Synthetic
agagagagaaagagaguga

SEQ ID NO: 8686 - RNA, 19 nt, Artificial Sequence
  Synthetic
ccagagagugagagagaga

SEQ ID NO: 8687 - RNA, 19 nt, Artificial Sequence
  Synthetic
caacugaagcugugauauu

SEQ ID NO: 8688 - RNA, 19 nt, Artificial Sequence
  Synthetic
aaagagagugagagagaga

SEQ ID NO: 8689 - RNA, 19 nt, Artificial Sequence
  Synthetic
ugagagagagagagaaaga

SEQ ID NO: 8690 - RNA, 19 nt, Artificial Sequence
  Synthetic
agagagagagaaagagaga

SEQ ID NO: 8691 - RNA, 19 nt, Artificial Sequence
  Synthetic
acgcaggccucgagguuau

SEQ ID NO: 8692 - RNA, 19 nt, Artificial Sequence
  Synthetic
agaaagagagagagagaug

SEQ ID NO: 8693 - RNA, 19 nt, Artificial Sequence
  Synthetic
agagagagaugcuguugaa

SEQ ID NO: 8694 - RNA, 19 nt, Artificial Sequence
  Synthetic
ccagaggcuucgagggcuu

SEQ ID NO: 8695 - RNA, 19 nt, Artificial Sequence
  Synthetic
gcccaaaguauuaaugcaa

SEQ ID NO: 8696 - RNA, 19 nt, Artificial Sequence
  Synthetic
ggaagagaguaaccaguuu

SEQ ID NO: 8697 - RNA, 19 nt, Artificial Sequence
  Synthetic
agagagagagagaaagaga

SEQ ID NO: 8698 - RNA, 19 nt, Artificial Sequence
  Synthetic
gaucaacagcccaaagauu

SEQ ID NO: 8699 - RNA, 19 nt, Artificial Sequence
  Synthetic
gcgagaaggaguucgugaa

SEQ ID NO: 8700 - RNA, 19 nt, Artificial Sequence
  Synthetic
agagugagagagagaaaga

SEQ ID NO: 8701 - RNA, 19 nt, Artificial Sequence
  Synthetic
ccgacauggcgcuggagua

SEQ ID NO: 8702 - RNA, 19 nt, Artificial Sequence
  Synthetic
ccaaaguauuaaugcaacu

SEQ ID NO: 8703 - RNA, 19 nt, Artificial Sequence
  Synthetic
uugcaagccucgagcugua

SEQ ID NO: 8704 - RNA, 19 nt, Artificial Sequence
  Synthetic
gaaacaggccaccgccaaa

SEQ ID NO: 8705 - RNA, 19 nt, Artificial Sequence
  Synthetic
guaaguguuucuugugcua

SEQ ID NO: 8706 - RNA, 19 nt, Artificial Sequence
  Synthetic
ccaaggagcucuacaacgu

SEQ ID NO: 8707 - RNA, 19 nt, Artificial Sequence
  Synthetic
aaucagaaacagaucaaca

SEQ ID NO: 8708 - RNA, 19 nt, Artificial Sequence
  Synthetic
ugagagagagaaagagagu

SEQ ID NO: 8709 - RNA, 19 nt, Artificial Sequence
  Synthetic
ugaguaaauuggugaguua

SEQ ID NO: 8710 - RNA, 19 nt, Artificial Sequence
  Synthetic
ccauuuguguuuagaguaa

SEQ ID NO: 8711 - RNA, 19 nt, Artificial Sequence
  Synthetic
ugagaagaauggaggagaa

SEQ ID NO: 8712 - RNA, 19 nt, Artificial Sequence
  Synthetic
gcauaagauugcacacaua

SEQ ID NO: 8713 - RNA, 19 nt, Artificial Sequence
  Synthetic
cugaugagcuggagugcaa

SEQ ID NO: 8714 - RNA, 19 nt, Artificial Sequence
  Synthetic
agggaaaguugaauguaua

SEQ ID NO: 8715 - RNA, 19 nt, Artificial Sequence
  Synthetic
aaacuaaacuucgggaaua

SEQ ID NO: 8716 - RNA, 19 nt, Artificial Sequence
  Synthetic
ucauggaggugcagagaga

SEQ ID NO: 8717 - RNA, 19 nt, Artificial Sequence
  Synthetic
ccuguaggcuggaaguaaa

SEQ ID NO: 8718 - RNA, 19 nt, Artificial Sequence
  Synthetic
ggauaugguccaaugaauu

SEQ ID NO: 8719 - RNA, 19 nt, Artificial Sequence
  Synthetic
gaagaauggaggagaagga

SEQ ID NO: 8720 - RNA, 19 nt, Artificial Sequence
  Synthetic
gcugagaaccuaaguauuu

SEQ ID NO: 8721 - RNA, 19 nt, Artificial Sequence
  Synthetic
gggauaugguccaaugaau

SEQ ID NO: 8722 - RNA, 19 nt, Artificial Sequence
  Synthetic
cuacaagaucauagacuuu

SEQ ID NO: 8723 - RNA, 19 nt, Artificial Sequence
  Synthetic
ccaaaugccucuacaagau

SEQ ID NO: 8724 - RNA, 19 nt, Artificial Sequence
  Synthetic
gauucaaguucuuacacaa

SEQ ID NO: 8725 - RNA, 19 nt, Artificial Sequence
  Synthetic
uggaauagcaguuugauuu

SEQ ID NO: 8726 - RNA, 19 nt, Artificial Sequence
  Synthetic
ccaaagugcuggaguguug

SEQ ID NO: 8727 - RNA, 19 nt, Artificial Sequence
  Synthetic
gaggaaaguugcucugaga

SEQ ID NO: 8728 - RNA, 19 nt, Artificial Sequence
  Synthetic
gagcaaucuuuguaugaca

SEQ ID NO: 8729 - RNA, 19 nt, Artificial Sequence
  Synthetic
guaaguaggaugagaauag

SEQ ID NO: 8730 - RNA, 19 nt, Artificial Sequence
  Synthetic
gaguguugucauaggguuu

SEQ ID NO: 8731 - RNA, 19 nt, Artificial Sequence
  Synthetic
gugcuggaguguugucaua

SEQ ID NO: 8732 - RNA, 19 nt, Artificial Sequence
  Synthetic
gggaauauguaugcccaaa

SEQ ID NO: 8733 - RNA, 19 nt, Artificial Sequence
  Synthetic
cuucuuaacugauaugcaa

SEQ ID NO: 8734 - RNA, 19 nt, Artificial Sequence
  Synthetic
agaaacaguuaaugagaug

SEQ ID NO: 8735 - RNA, 19 nt, Artificial Sequence
  Synthetic
ggaagaagugccugccaga

SEQ ID NO: 8736 - RNA, 19 nt, Artificial Sequence
  Synthetic
cuugacuuguggaggcaaa

SEQ ID NO: 8737 - RNA, 19 nt, Artificial Sequence
  Synthetic
uagggaaaguugaauguau

SEQ ID NO: 8738 - RNA, 19 nt, Artificial Sequence
  Synthetic
ucuacuuacuggugucuaa

SEQ ID NO: 8739 - RNA, 19 nt, Artificial Sequence
  Synthetic
gagaacaauuauaagggua

SEQ ID NO: 8740 - RNA, 19 nt, Artificial Sequence
  Synthetic
ccugagaaguggaauacaa

SEQ ID NO: 8741 - RNA, 19 nt, Artificial Sequence
  Synthetic
cguaaauguaucagaccaa

SEQ ID NO: 8742 - RNA, 19 nt, Artificial Sequence
  Synthetic
cagaauagcuacaucaaaa

SEQ ID NO: 8743 - RNA, 19 nt, Artificial Sequence
  Synthetic
aauugaaggucuacagaau

SEQ ID NO: 8744 - RNA, 19 nt, Artificial Sequence
  Synthetic
gcuagagaauccagugaau

SEQ ID NO: 8745 - RNA, 19 nt, Artificial Sequence
  Synthetic
aguugaaauugaaggucua

SEQ ID NO: 8746 - RNA, 19 nt, Artificial Sequence
  Synthetic
agaguaaaccugaggcauu

SEQ ID NO: 8747 - RNA, 19 nt, Artificial Sequence
  Synthetic
ggaaugggaaguugaaauu

SEQ ID NO: 8748 - RNA, 19 nt, Artificial Sequence
  Synthetic
caucagaaagaauggaauu

SEQ ID NO: 8749 - RNA, 19 nt, Artificial Sequence
  Synthetic
caguauuacaaauggaaga

SEQ ID NO: 8750 - RNA, 19 nt, Artificial Sequence
  Synthetic
gguucuagaaagcaaguaa

SEQ ID NO: 8751 - RNA, 19 nt, Artificial Sequence
  Synthetic
caucaaaagccacagaaua

SEQ ID NO: 8752 - RNA, 19 nt, Artificial Sequence
  Synthetic
ccuaaagacccacguaaau

SEQ ID NO: 8753 - RNA, 19 nt, Artificial Sequence
  Synthetic
cugcuaagccuguaaguga

SEQ ID NO: 8754 - RNA, 19 nt, Artificial Sequence
  Synthetic
uagagaauccagugaauuu

SEQ ID NO: 8755 - RNA, 19 nt, Artificial Sequence
  Synthetic
ggaucuacagcaucagaaa

SEQ ID NO: 8756 - RNA, 19 nt, Artificial Sequence
  Synthetic
gaauacugguuaaagauga

SEQ ID NO: 8757 - RNA, 19 nt, Artificial Sequence
  Synthetic
gaguaaaccugaggcauuu

SEQ ID NO: 8758 - RNA, 19 nt, Artificial Sequence
  Synthetic
gcucaaaguuccaaauuuc

SEQ ID NO: 8759 - RNA, 19 nt, Artificial Sequence
  Synthetic
uggaaugggaaguugaaau

SEQ ID NO: 8760 - RNA, 19 nt, Artificial Sequence
  Synthetic
gaaaauggaucuacagcau

SEQ ID NO: 8761 - RNA, 19 nt, Artificial Sequence
  Synthetic
agcaugagcuucagaguca

SEQ ID NO: 8762 - RNA, 19 nt, Artificial Sequence
  Synthetic
gugaagauaugauggaaug

SEQ ID NO: 8763 - RNA, 19 nt, Artificial Sequence
  Synthetic
agugaagauaugauggaau

SEQ ID NO: 8764 - RNA, 19 nt, Artificial Sequence
  Synthetic
cuacagcaucagaaagaau

SEQ ID NO: 8765 - RNA, 19 nt, Artificial Sequence
  Synthetic
ccacagaauacuacagaac

SEQ ID NO: 8766 - RNA, 19 nt, Artificial Sequence
  Synthetic
cugagaaguggaauacaaa

SEQ ID NO: 8767 - RNA, 19 nt, Artificial Sequence
  Synthetic
ggaagaaaauggaucuaca

SEQ ID NO: 8768 - RNA, 19 nt, Artificial Sequence
  Synthetic
ggacaguauuacaaaugga

SEQ ID NO: 8769 - RNA, 19 nt, Artificial Sequence
  Synthetic
agacgaaugaagaggacaa

SEQ ID NO: 8770 - RNA, 19 nt, Artificial Sequence
  Synthetic
cuugagaacuugugugaga

SEQ ID NO: 8771 - RNA, 19 nt, Artificial Sequence
  Synthetic
gagcagaaagcaagugauu

SEQ ID NO: 8772 - RNA, 19 nt, Artificial Sequence
  Synthetic
cuacaugaggaaugagaau

SEQ ID NO: 8773 - RNA, 19 nt, Artificial Sequence
  Synthetic
gcgagaauuuauacaaaca

SEQ ID NO: 8774 - RNA, 19 nt, Artificial Sequence
  Synthetic
gacaagacccugcaggaaa

SEQ ID NO: 8775 - RNA, 19 nt, Artificial Sequence
  Synthetic
gagcaacaaccgucugaaa

SEQ ID NO: 8776 - RNA, 19 nt, Artificial Sequence
  Synthetic
caggaaauuuacaggaagu

SEQ ID NO: 8777 - RNA, 19 nt, Artificial Sequence
  Synthetic
caaacagauaugagacgaa

SEQ ID NO: 8778 - RNA, 19 nt, Artificial Sequence
  Synthetic
aggcgagaauuuauacaaa

SEQ ID NO: 8779 - RNA, 19 nt, Artificial Sequence
  Synthetic
gggcaaacgccuggauuau

SEQ ID NO: 8780 - RNA, 19 nt, Artificial Sequence
  Synthetic
ggauggacgaagaaaguga

SEQ ID NO: 8781 - RNA, 19 nt, Artificial Sequence
  Synthetic
caacaacaaccaugaguca

SEQ ID NO: 8782 - RNA, 19 nt, Artificial Sequence
  Synthetic
ccgacgagcugcuugagaa

SEQ ID NO: 8783 - RNA, 19 nt, Artificial Sequence
  Synthetic
ggacaagacccugcaggaa

SEQ ID NO: 8784 - RNA, 19 nt, Artificial Sequence
  Synthetic
uggauuaucucaaccuaaa

SEQ ID NO: 8785 - RNA, 19 nt, Artificial Sequence
  Synthetic
agcucaacaucgaggacua

SEQ ID NO: 8786 - RNA, 19 nt, Artificial Sequence
  Synthetic
ggagcaaggcugccaaauu

SEQ ID NO: 8787 - RNA, 19 nt, Artificial Sequence
  Synthetic
cgaagaaagugaacugauc

SEQ ID NO: 8788 - RNA, 19 nt, Artificial Sequence
  Synthetic
gaaauuuacaggaaguaca

SEQ ID NO: 8789 - RNA, 19 nt, Artificial Sequence
  Synthetic
acaagacccugcaggaaau

SEQ ID NO: 8790 - RNA, 19 nt, Artificial Sequence
  Synthetic
gauaugagacgaaugaaga

SEQ ID NO: 8791 - RNA, 19 nt, Artificial Sequence
  Synthetic
cgggagaccuuccagggua

SEQ ID NO: 8792 - RNA, 19 nt, Artificial Sequence
  Synthetic
ugggcaaacgccuggauua

SEQ ID NO: 8793 - RNA, 19 nt, Artificial Sequence
  Synthetic
gcuauuuugucaucguuua

SEQ ID NO: 8794 - RNA, 19 nt, Artificial Sequence
  Synthetic
ggacgaagaaagugaacug

SEQ ID NO: 8795 - RNA, 19 nt, Artificial Sequence
  Synthetic
acagaaagcugaucgaauc

SEQ ID NO: 8796 - RNA, 19 nt, Artificial Sequence
  Synthetic
guauggaggaacagcauca

SEQ ID NO: 8797 - RNA, 19 nt, Artificial Sequence
  Synthetic
ccaagaaguuccaggucac

SEQ ID NO: 8798 - RNA, 19 nt, Artificial Sequence
  Synthetic
gcgcuauguuuaccaacua

SEQ ID NO: 8799 - RNA, 19 nt, Artificial Sequence
  Synthetic
agacauacaacguggacua

SEQ ID NO: 8800 - RNA, 19 nt, Artificial Sequence
  Synthetic
ggaagaaggaggaagaacu

SEQ ID NO: 8801 - RNA, 19 nt, Artificial Sequence
  Synthetic
gauggaaugccuucagaaa

SEQ ID NO: 8802 - RNA, 19 nt, Artificial Sequence
  Synthetic
agcaguagguggcaaauua

SEQ ID NO: 8803 - RNA, 19 nt, Artificial Sequence
  Synthetic
gggaaacccuuuugguguu

SEQ ID NO: 8804 - RNA, 19 nt, Artificial Sequence
  Synthetic
gcauguugaucuuuccaua

SEQ ID NO: 8805 - RNA, 19 nt, Artificial Sequence
  Synthetic
gguuugggacugaauauua

SEQ ID NO: 8806 - RNA, 19 nt, Artificial Sequence
  Synthetic
gguuuagguugggcaauua

SEQ ID NO: 8807 - RNA, 19 nt, Artificial Sequence
  Synthetic
gagaagauagcuaugucua

SEQ ID NO: 8808 - RNA, 19 nt, Artificial Sequence
  Synthetic
uggaaugccuucagaaauc

SEQ ID NO: 8809 - RNA, 19 nt, Artificial Sequence
  Synthetic
gcccauaugugaaagaaau

SEQ ID NO: 8810 - RNA, 19 nt, Artificial Sequence
  Synthetic
agugauagcuggacacaca

SEQ ID NO: 8811 - RNA, 19 nt, Artificial Sequence
  Synthetic
ugggaacaauguagaauau

SEQ ID NO: 8812 - RNA, 19 nt, Artificial Sequence
  Synthetic
gcuacaaccucaccgacaa

SEQ ID NO: 8813 - RNA, 19 nt, Artificial Sequence
  Synthetic
ucacagaucuuucucuaaa

SEQ ID NO: 8814 - RNA, 19 nt, Artificial Sequence
  Synthetic
cgacaugguucccguggau

SEQ ID NO: 8815 - RNA, 19 nt, Artificial Sequence
  Synthetic
gcucaacauuggacagugu

SEQ ID NO: 8816 - RNA, 19 nt, Artificial Sequence
  Synthetic
gcucacagaucuuucucua

SEQ ID NO: 8817 - RNA, 19 nt, Artificial Sequence
  Synthetic
agaggaaugucuacguauu

SEQ ID NO: 8818 - RNA, 19 nt, Artificial Sequence
  Synthetic
gagccaacucaccggcaua

SEQ ID NO: 8819 - RNA, 19 nt, Artificial Sequence
  Synthetic
ggacagugugugcgcauca

SEQ ID NO: 8820 - RNA, 19 nt, Artificial Sequence
  Synthetic
gaggaaugucuacguauuu

SEQ ID NO: 8821 - RNA, 19 nt, Artificial Sequence
  Synthetic
gcuggacacacaaggaauu

SEQ ID NO: 8822 - RNA, 19 nt, Artificial Sequence
  Synthetic
caagcuucuucgacaggaa

SEQ ID NO: 8823 - RNA, 19 nt, Artificial Sequence
  Synthetic
gauauguauuacugagaac

SEQ ID NO: 8824 - RNA, 19 nt, Artificial Sequence
  Synthetic
gcaguuuccccaugagaua

SEQ ID NO: 8825 - RNA, 19 nt, Artificial Sequence
  Synthetic
cccaugagauagaggaaug

SEQ ID NO: 8826 - RNA, 19 nt, Artificial Sequence
  Synthetic
guacagggguauuauauau

SEQ ID NO: 8827 - RNA, 19 nt, Artificial Sequence
  Synthetic
ggcagaugacggacaguga

SEQ ID NO: 8828 - RNA, 19 nt, Artificial Sequence
  Synthetic
ucacaacuccccaaagaaa

SEQ ID NO: 8829 - RNA, 19 nt, Artificial Sequence
  Synthetic
gggaacaauguagaauaua

SEQ ID NO: 8830 - RNA, 19 nt, Artificial Sequence
  Synthetic
gauguuucguucugugaca

SEQ ID NO: 8831 - RNA, 19 nt, Artificial Sequence
  Synthetic
gaaagaaauccacucuaca

SEQ ID NO: 8832 - RNA, 19 nt, Artificial Sequence
  Synthetic
gcacauagcuaaaucacaa

SEQ ID NO: 8833 - RNA, 19 nt, Artificial Sequence
  Synthetic
gcuuuguguugguguguaa

SEQ ID NO: 8834 - RNA, 19 nt, Artificial Sequence
  Synthetic
ggaacgagcugcaguuuga

SEQ ID NO: 8835 - RNA, 19 nt, Artificial Sequence
  Synthetic
gggcuaauuacccggaaua

SEQ ID NO: 8836 - RNA, 19 nt, Artificial Sequence
  Synthetic
caacagugcgucugaggaa

SEQ ID NO: 8837 - RNA, 19 nt, Artificial Sequence
  Synthetic
cguuguacgugaauguuua

SEQ ID NO: 8838 - RNA, 19 nt, Artificial Sequence
  Synthetic
uuucagugguccagcuuua

SEQ ID NO: 8839 - RNA, 19 nt, Artificial Sequence
  Synthetic
gugcguagccuccguguaa

SEQ ID NO: 8840 - RNA, 19 nt, Artificial Sequence
  Synthetic
cagcagaagucccuauuuu

SEQ ID NO: 8841 - RNA, 19 nt, Artificial Sequence
  Synthetic
ccacaucacaugaccuuaa

SEQ ID NO: 8842 - RNA, 19 nt, Artificial Sequence
  Synthetic
cgaagauacauguguuuga

SEQ ID NO: 8843 - RNA, 19 nt, Artificial Sequence
  Synthetic
aagggaacauagauggaau

SEQ ID NO: 8844 - RNA, 19 nt, Artificial Sequence
  Synthetic
acacgaaacuagagagaaa

SEQ ID NO: 8845 - RNA, 19 nt, Artificial Sequence
  Synthetic
cggacaagcugaagaagaa

SEQ ID NO: 8846 - RNA, 19 nt, Artificial Sequence
  Synthetic
agaagaagaagaagaggaa

SEQ ID NO: 8847 - RNA, 19 nt, Artificial Sequence
  Synthetic
ccucuuaguugguguguga

SEQ ID NO: 8848 - RNA, 19 nt, Artificial Sequence
  Synthetic
ggguuuggcucauuugaaa

SEQ ID NO: 8849 - RNA, 19 nt, Artificial Sequence
  Synthetic
gguagcagcauaaagguua

SEQ ID NO: 8850 - RNA, 19 nt, Artificial Sequence
  Synthetic
guuccugguugguggcuaa

SEQ ID NO: 8851 - RNA, 19 nt, Artificial Sequence
  Synthetic
acucauagguucugucuuu

SEQ ID NO: 8852 - RNA, 19 nt, Artificial Sequence
  Synthetic
cuaauugauugguagguuu

SEQ ID NO: 8853 - RNA, 19 nt, Artificial Sequence
  Synthetic
ggggagagguguucgguuu

SEQ ID NO: 8854 - RNA, 19 nt, Artificial Sequence
  Synthetic
cugaucaggucaaagaaau

SEQ ID NO: 8855 - RNA, 19 nt, Artificial Sequence
  Synthetic
gcaacugucacgugugcua

SEQ ID NO: 8856 - RNA, 19 nt, Artificial Sequence
  Synthetic
gcauaaagguuaggcaauc

SEQ ID NO: 8857 - RNA, 19 nt, Artificial Sequence
  Synthetic
ccaaagaucuacccugaga

SEQ ID NO: 8858 - RNA, 19 nt, Artificial Sequence
  Synthetic
uaacacgaaacuagagaga

SEQ ID NO: 8859 - RNA, 19 nt, Artificial Sequence
  Synthetic
auaguaagcugguuuagaa

SEQ ID NO: 8860 - RNA, 19 nt, Artificial Sequence
  Synthetic
gcaaucagcuucuuuauau

SEQ ID NO: 8861 - RNA, 19 nt, Artificial Sequence
  Synthetic
aaacggacaagcugaagaa

SEQ ID NO: 8862 - RNA, 19 nt, Artificial Sequence
  Synthetic
gcuggugguucuuagguuu

SEQ ID NO: 8863 - RNA, 19 nt, Artificial Sequence
  Synthetic
ccacagagcuccacagcaa

SEQ ID NO: 8864 - RNA, 19 nt, Artificial Sequence
  Synthetic
gcacagugguauccaggaa

SEQ ID NO: 8865 - RNA, 19 nt, Artificial Sequence
  Synthetic
caguaaaaguguucuguau

SEQ ID NO: 8866 - RNA, 19 nt, Artificial Sequence
  Synthetic
cuucaauucuguggguaaa

SEQ ID NO: 8867 - RNA, 19 nt, Artificial Sequence
  Synthetic
gguaaauguguguuuguuu

SEQ ID NO: 8868 - RNA, 19 nt, Artificial Sequence
  Synthetic
gaaccugacuagcccaaau

SEQ ID NO: 8869 - RNA, 19 nt, Artificial Sequence
  Synthetic
acaagaaaccaaaccuuuu

SEQ ID NO: 8870 - RNA, 19 nt, Artificial Sequence
  Synthetic
ugacuagcccaaauagcaa

SEQ ID NO: 8871 - RNA, 19 nt, Artificial Sequence
  Synthetic
agacaagaaaccaaaccuu

SEQ ID NO: 8872 - RNA, 19 nt, Artificial Sequence
  Synthetic
gacaagaaaccaaaccuuu

SEQ ID NO: 8873 - RNA, 19 nt, Artificial Sequence
  Synthetic
ccucaggcccuccagagua

SEQ ID NO: 8874 - RNA, 19 nt, Artificial Sequence
  Synthetic
guaaauguguguuuguuuc

SEQ ID NO: 8875 - RNA, 19 nt, Artificial Sequence
  Synthetic
gcucauauucuccaucuuu

SEQ ID NO: 8876 - RNA, 19 nt, Artificial Sequence
  Synthetic
cugacuagcccaaauagca

SEQ ID NO: 8877 - RNA, 19 nt, Artificial Sequence
  Synthetic
ggguaaauguguguuuguu

SEQ ID NO: 8878 - RNA, 19 nt, Artificial Sequence
  Synthetic
guaaaaguguucuguauuc

SEQ ID NO: 8879 - RNA, 19 nt, Artificial Sequence
  Synthetic
ucacuggagcugcuucaaa

SEQ ID NO: 8880 - RNA, 19 nt, Artificial Sequence
  Synthetic
cacuggagcugcuucaaaa

SEQ ID NO: 8881 - RNA, 19 nt, Artificial Sequence
  Synthetic
gcuguucccagacaagaaa

SEQ ID NO: 8882 - RNA, 19 nt, Artificial Sequence
  Synthetic
ggaccaagcaguuccuuug

SEQ ID NO: 8883 - RNA, 19 nt, Artificial Sequence
  Synthetic
gguauugucuuccuuugua

SEQ ID NO: 8884 - RNA, 19 nt, Artificial Sequence
  Synthetic
gcaguaaaaguguucugua

SEQ ID NO: 8885 - RNA, 19 nt, Artificial Sequence
  Synthetic
ucacucuguugcucauauu

SEQ ID NO: 8886 - RNA, 19 nt, Artificial Sequence
  Synthetic
uugaaggacugggagaugu

SEQ ID NO: 8887 - RNA, 19 nt, Artificial Sequence
  Synthetic
guuuguuucucuuugaaug

SEQ ID NO: 8888 - RNA, 19 nt, Artificial Sequence
  Synthetic
aaccugacuagcccaaaua

SEQ ID NO: 8889 - RNA, 19 nt, Artificial Sequence
  Synthetic
gcccaagagccgcuacuuc

SEQ ID NO: 8890 - RNA, 19 nt, Artificial Sequence
  Synthetic
ucaacaacacguuccauac

SEQ ID NO: 8891 - RNA, 19 nt, Artificial Sequence
  Synthetic
aaagggcugcacaguggua

SEQ ID NO: 8892 - RNA, 19 nt, Artificial Sequence
  Synthetic
guguuuguuucucuuugaa

SEQ ID NO: 8893 - RNA, 19 nt, Artificial Sequence
  Synthetic
aagaggaacucaaaggaga

SEQ ID NO: 8894 - RNA, 19 nt, Artificial Sequence
  Synthetic
cggaccaaucagaggguga

SEQ ID NO: 8895 - RNA, 19 nt, Artificial Sequence
  Synthetic
gcgcaaacccaggccguua

SEQ ID NO: 8896 - RNA, 19 nt, Artificial Sequence
  Synthetic
uaguggaguggcugagaaa

SEQ ID NO: 8897 - RNA, 19 nt, Artificial Sequence
  Synthetic
cggccgaugugcaggaucu

SEQ ID NO: 8898 - RNA, 19 nt, Artificial Sequence
  Synthetic
uggugaagacgguggagga

SEQ ID NO: 8899 - RNA, 19 nt, Artificial Sequence
  Synthetic
gcagcagccaagaggacuu

SEQ ID NO: 8900 - RNA, 19 nt, Artificial Sequence
  Synthetic
cggucaagaggaacucaaa

SEQ ID NO: 8901 - RNA, 19 nt, Artificial Sequence
  Synthetic
caguaugucaugcaaguuu

SEQ ID NO: 8902 - RNA, 19 nt, Artificial Sequence
  Synthetic
ugaagacgguggaggauug

SEQ ID NO: 8903 - RNA, 19 nt, Artificial Sequence
  Synthetic
uccauucggucaagaggaa

SEQ ID NO: 8904 - RNA, 19 nt, Artificial Sequence
  Synthetic
ggaacucaaaggagacagu

SEQ ID NO: 8905 - RNA, 19 nt, Artificial Sequence
  Synthetic
cgcaguaugucaugcaagu

SEQ ID NO: 8906 - RNA, 19 nt, Artificial Sequence
  Synthetic
gggcagccgcaguauguca

SEQ ID NO: 8907 - RNA, 19 nt, Artificial Sequence
  Synthetic
ugaaugggcagccgcagua

SEQ ID NO: 8908 - RNA, 19 nt, Artificial Sequence
  Synthetic
gugugcuucuuguuuauaa

SEQ ID NO: 8909 - RNA, 19 nt, Artificial Sequence
  Synthetic
auggugugcuucuuguuua

SEQ ID NO: 8910 - RNA, 19 nt, Artificial Sequence
  Synthetic
caacaguagugcggacucu

SEQ ID NO: 8911 - RNA, 19 nt, Artificial Sequence
  Synthetic
caugagaagcggacucugu

SEQ ID NO: 8912 - RNA, 19 nt, Artificial Sequence
  Synthetic
ggaagccgucggacugauu

SEQ ID NO: 8913 - RNA, 19 nt, Artificial Sequence
  Synthetic
uuaguggaguggcugagaa

SEQ ID NO: 8914 - RNA, 19 nt, Artificial Sequence
  Synthetic
aaaggagacaguuguuuga

SEQ ID NO: 8915 - RNA, 19 nt, Artificial Sequence
  Synthetic
uccaaagucugucaaugua

SEQ ID NO: 8916 - RNA, 19 nt, Artificial Sequence
  Synthetic
gauuguggcagccuaguga

SEQ ID NO: 8917 - RNA, 19 nt, Artificial Sequence
  Synthetic
ucgcacucuucacuauuua

SEQ ID NO: 8918 - RNA, 19 nt, Artificial Sequence
  Synthetic
ugagaagcggacucuguuu

SEQ ID NO: 8919 - RNA, 19 nt, Artificial Sequence
  Synthetic
ugauucuccucauuccaaa

SEQ ID NO: 8920 - RNA, 19 nt, Artificial Sequence
  Synthetic
ucaagaggaacucaaagga

SEQ ID NO: 8921 - RNA, 19 nt, Artificial Sequence
  Synthetic
ucaauguaccuucuaacca

SEQ ID NO: 8922 - RNA, 19 nt, Artificial Sequence
  Synthetic
ucaaaggagacaguuguuu

SEQ ID NO: 8923 - RNA, 19 nt, Artificial Sequence
  Synthetic
ggaaauggagcgaaggaaa

SEQ ID NO: 8924 - RNA, 19 nt, Artificial Sequence
  Synthetic
ccaacugacuugaaggaaa

SEQ ID NO: 8925 - RNA, 19 nt, Artificial Sequence
  Synthetic
aagccaaacaagaggauaa

SEQ ID NO: 8926 - RNA, 19 nt, Artificial Sequence
  Synthetic
cuaaagagaacaugaguuu

SEQ ID NO: 8927 - RNA, 19 nt, Artificial Sequence
  Synthetic
ccaaacaagaggauaaauu

SEQ ID NO: 8928 - RNA, 19 nt, Artificial Sequence
  Synthetic
caacugacuugaaggaaaa

SEQ ID NO: 8929 - RNA, 19 nt, Artificial Sequence
  Synthetic
ccucuuaacagaagccaaa

SEQ ID NO: 8930 - RNA, 19 nt, Artificial Sequence
  Synthetic
gaaauggagcgaaggaaaa

SEQ ID NO: 8931 - RNA, 19 nt, Artificial Sequence
  Synthetic
gauuugaauagcaguguua

SEQ ID NO: 8932 - RNA, 19 nt, Artificial Sequence
  Synthetic
aggauaaauucaaggaucu

SEQ ID NO: 8933 - RNA, 19 nt, Artificial Sequence
  Synthetic
ccgaagauccggauauuuu

SEQ ID NO: 8934 - RNA, 19 nt, Artificial Sequence
  Synthetic
gcuacaaggaugagcggga

SEQ ID NO: 8935 - RNA, 19 nt, Artificial Sequence
  Synthetic
ggacuguuagguugaauua

SEQ ID NO: 8936 - RNA, 19 nt, Artificial Sequence
  Synthetic
caauaagugcagacagcau

SEQ ID NO: 8937 - RNA, 19 nt, Artificial Sequence
  Synthetic
uaacagaagccaaacaaga

SEQ ID NO: 8938 - RNA, 19 nt, Artificial Sequence
  Synthetic
aggaaggcauggagcgcuu

SEQ ID NO: 8939 - RNA, 19 nt, Artificial Sequence
  Synthetic
cagacagcauugacggaau

SEQ ID NO: 8940 - RNA, 19 nt, Artificial Sequence
  Synthetic
gaggauaaauucaaggauc

SEQ ID NO: 8941 - RNA, 19 nt, Artificial Sequence
  Synthetic
gguaaugugaugacuguuu

SEQ ID NO: 8942 - RNA, 19 nt, Artificial Sequence
  Synthetic
ccggauauuuucuacuuua

SEQ ID NO: 8943 - RNA, 19 nt, Artificial Sequence
  Synthetic
ugaugacuguuuagguuua

SEQ ID NO: 8944 - RNA, 19 nt, Artificial Sequence
  Synthetic
cugaggaauuggaccauuu

SEQ ID NO: 8945 - RNA, 19 nt, Artificial Sequence
  Synthetic
aaaaguauguccucagaaa

SEQ ID NO: 8946 - RNA, 19 nt, Artificial Sequence
  Synthetic
gaacucugccaaacaaaua

SEQ ID NO: 8947 - RNA, 19 nt, Artificial Sequence
  Synthetic
gcacccauguugucacuua

SEQ ID NO: 8948 - RNA, 19 nt, Artificial Sequence
  Synthetic
cugauggcauguugaggua

SEQ ID NO: 8949 - RNA, 19 nt, Artificial Sequence
  Synthetic
ggagggaguccaaguccaa

SEQ ID NO: 8950 - RNA, 19 nt, Artificial Sequence
  Synthetic
gcaacuacagugaagauga

SEQ ID NO: 8951 - RNA, 19 nt, Artificial Sequence
  Synthetic
ggcuaaacuuccuaacaga

SEQ ID NO: 8952 - RNA, 19 nt, Artificial Sequence
  Synthetic
ggagaugcugggagggagu

SEQ ID NO: 8953 - RNA, 19 nt, Artificial Sequence
  Synthetic
acgaagaggaugaggagaa

SEQ ID NO: 8954 - RNA, 19 nt, Artificial Sequence
  Synthetic
ccuuuaaagcagaagcaaa

SEQ ID NO: 8955 - RNA, 19 nt, Artificial Sequence
  Synthetic
gcauugagaacaagaacaa

SEQ ID NO: 8956 - RNA, 19 nt, Artificial Sequence
  Synthetic
cuuuaaagcagaagcaaau

SEQ ID NO: 8957 - RNA, 19 nt, Artificial Sequence
  Synthetic
agaacaaccaggagaccaa

SEQ ID NO: 8958 - RNA, 19 nt, Artificial Sequence
  Synthetic
gagaaacagagcagccaua

SEQ ID NO: 8959 - RNA, 19 nt, Artificial Sequence
  Synthetic
ggaaggaugacgagcugaa

SEQ ID NO: 8960 - RNA, 19 nt, Artificial Sequence
  Synthetic
caagaaaccuaaaagggaa

SEQ ID NO: 8961 - RNA, 19 nt, Artificial Sequence
  Synthetic
ggaucugggcgucaggaaa

SEQ ID NO: 8962 - RNA, 19 nt, Artificial Sequence
  Synthetic
gagagaacauggaucugaa

SEQ ID NO: 8963 - RNA, 19 nt, Artificial Sequence
  Synthetic
uaacagaagagguugauga

SEQ ID NO: 8964 - RNA, 19 nt, Artificial Sequence
  Synthetic
ucuauggcauugagaacaa

SEQ ID NO: 8965 - RNA, 19 nt, Artificial Sequence
  Synthetic
uuucauaacagaagagguu

SEQ ID NO: 8966 - RNA, 19 nt, Artificial Sequence
  Synthetic
cagaagagguugaugaguc

SEQ ID NO: 8967 - RNA, 19 nt, Artificial Sequence
  Synthetic
aaggagaugugguggaagu

SEQ ID NO: 8968 - RNA, 19 nt, Artificial Sequence
  Synthetic
cgaaggagaugugguggaa

SEQ ID NO: 8969 - RNA, 19 nt, Artificial Sequence
  Synthetic
cggaauggaaggaugacga

SEQ ID NO: 8970 - RNA, 19 nt, Artificial Sequence
  Synthetic
ucauaacagaagagguuga

SEQ ID NO: 8971 - RNA, 19 nt, Artificial Sequence
  Synthetic
agaccaagcccucggacga

SEQ ID NO: 8972 - RNA, 19 nt, Artificial Sequence
  Synthetic
gaucuauggcauugagaac

SEQ ID NO: 8973 - RNA, 19 nt, Artificial Sequence
  Synthetic
gguacaaagacgaugccga

SEQ ID NO: 8974 - RNA, 19 nt, Artificial Sequence
  Synthetic
ucaugggaggagagaaauu

SEQ ID NO: 8975 - RNA, 19 nt, Artificial Sequence
  Synthetic
aagauugacuucucggaau

SEQ ID NO: 8976 - RNA, 19 nt, Artificial Sequence
  Synthetic
acuggaaccuucuggaaca

SEQ ID NO: 8977 - RNA, 19 nt, Artificial Sequence
  Synthetic
agaacauggaucugaacuu

SEQ ID NO: 8978 - RNA, 19 nt, Artificial Sequence
  Synthetic
acaucgacauccaggcgaa

SEQ ID NO: 8979 - RNA, 19 nt, Artificial Sequence
  Synthetic
gcaggagaucuauggcauu

SEQ ID NO: 8980 - RNA, 19 nt, Artificial Sequence
  Synthetic
gcaagaaaccuaaaaggga

SEQ ID NO: 8981 - RNA, 19 nt, Artificial Sequence
  Synthetic
aagaaaccuaaaagggaaa

SEQ ID NO: 8982 - RNA, 19 nt, Artificial Sequence
  Synthetic
cgacaacagcaacgagugu

SEQ ID NO: 8983 - RNA, 19 nt, Artificial Sequence
  Synthetic
ggauaaagauggugauaga

SEQ ID NO: 8984 - RNA, 19 nt, Artificial Sequence
  Synthetic
gcaaagugucauaaggaaa

SEQ ID NO: 8985 - RNA, 19 nt, Artificial Sequence
  Synthetic
agaucaagauggaggaaau

SEQ ID NO: 8986 - RNA, 19 nt, Artificial Sequence
  Synthetic
ucagauaugaagagagaua

SEQ ID NO: 8987 - RNA, 19 nt, Artificial Sequence
  Synthetic
gcucagauaugaagagaga

SEQ ID NO: 8988 - RNA, 19 nt, Artificial Sequence
  Synthetic
gaagaaagaugaugguuau

SEQ ID NO: 8989 - RNA, 19 nt, Artificial Sequence
  Synthetic
ggacaaagauugaagaaug

SEQ ID NO: 8990 - RNA, 19 nt, Artificial Sequence
  Synthetic
agaagaaagaugaugguua

SEQ ID NO: 8991 - RNA, 19 nt, Artificial Sequence
  Synthetic
acaaagaggacauggagaa

SEQ ID NO: 8992 - RNA, 19 nt, Artificial Sequence
  Synthetic
gcauauguccucugggaua

SEQ ID NO: 8993 - RNA, 19 nt, Artificial Sequence
  Synthetic
gcaugaagcucuaaggcau

SEQ ID NO: 8994 - RNA, 19 nt, Artificial Sequence
  Synthetic
gguggaaguuuguggaaca

SEQ ID NO: 8995 - RNA, 19 nt, Artificial Sequence
  Synthetic
caauggagauguugcuaaa

SEQ ID NO: 8996 - RNA, 19 nt, Artificial Sequence
  Synthetic
cagcauacccagauuguua

SEQ ID NO: 8997 - RNA, 19 nt, Artificial Sequence
  Synthetic
ggauuguggaugagaagaa

SEQ ID NO: 8998 - RNA, 19 nt, Artificial Sequence
  Synthetic
caauaaaggucaucuucaa

SEQ ID NO: 8999 - RNA, 19 nt, Artificial Sequence
  Synthetic
gaccagauguggauguaaa

SEQ ID NO: 9000 - RNA, 19 nt, Artificial Sequence
  Synthetic
guuagagucucguaggaaa

SEQ ID NO: 9001 - RNA, 19 nt, Artificial Sequence
  Synthetic
ggaaauggacguaggggaa

SEQ ID NO: 9002 - RNA, 19 nt, Artificial Sequence
  Synthetic
gggcaugucugaucugaaa

SEQ ID NO: 9003 - RNA, 19 nt, Artificial Sequence
  Synthetic
cguaggaaaucuaagaaga

SEQ ID NO: 9004 - RNA, 19 nt, Artificial Sequence
  Synthetic
agguaaaguuggccgagua

SEQ ID NO: 9005 - RNA, 19 nt, Artificial Sequence
  Synthetic
augucgaagcagaggauaa

SEQ ID NO: 9006 - RNA, 19 nt, Artificial Sequence
  Synthetic
ggauaauaccaaugucaau

SEQ ID NO: 9007 - RNA, 19 nt, Artificial Sequence
  Synthetic
caacagauuuauucagaca

SEQ ID NO: 9008 - RNA, 19 nt, Artificial Sequence
  Synthetic
ggacaaggauaauaccaau

SEQ ID NO: 9009 - RNA, 19 nt, Artificial Sequence
  Synthetic
guaagaaacgugaugauau

SEQ ID NO: 9010 - RNA, 19 nt, Artificial Sequence
  Synthetic
gaccauggauuguggauga

SEQ ID NO: 9011 - RNA, 19 nt, Artificial Sequence
  Synthetic
gauugaagaauguguggua

SEQ ID NO: 9012 - RNA, 19 nt, Artificial Sequence
  Synthetic
agaaaugccucaucuguaa

SEQ ID NO: 9013 - RNA, 19 nt, Artificial Sequence
  Synthetic
ggauaauguuggaaagaaa

SEQ ID NO: 9014 - RNA, 19 nt, Artificial Sequence
  Synthetic
ucucauagcugaugggaua

SEQ ID NO: 9015 - RNA, 19 nt, Artificial Sequence
  Synthetic
gguuaaggguucuggaaga

SEQ ID NO: 9016 - RNA, 19 nt, Artificial Sequence
  Synthetic
ggucauaaguggaagcaca

SEQ ID NO: 9017 - RNA, 19 nt, Artificial Sequence
  Synthetic
caacuaaaauggagagcaa

SEQ ID NO: 9018 - RNA, 19 nt, Artificial Sequence
  Synthetic
ggaaagaaagguugugaau

SEQ ID NO: 9019 - RNA, 19 nt, Artificial Sequence
  Synthetic
agcaaaacuuagagaguaa

SEQ ID NO: 9020 - RNA, 19 nt, Artificial Sequence
  Synthetic
cagcaaagacgacagauua

SEQ ID NO: 9021 - RNA, 19 nt, Artificial Sequence
  Synthetic
cugggaaguugaagacaaa

SEQ ID NO: 9022 - RNA, 19 nt, Artificial Sequence
  Synthetic
ccggaugggucaugggauu

SEQ ID NO: 9023 - RNA, 19 nt, Artificial Sequence
  Synthetic
agacacaauagcaaggaaa

SEQ ID NO: 9024 - RNA, 19 nt, Artificial Sequence
  Synthetic
cuacagacugcuaagaaua

SEQ ID NO: 9025 - RNA, 19 nt, Artificial Sequence
  Synthetic
gagaagaaacugcuagaau

SEQ ID NO: 9026 - RNA, 19 nt, Artificial Sequence
  Synthetic
gcuuggagcaugaggauga

SEQ ID NO: 9027 - RNA, 19 nt, Artificial Sequence
  Synthetic
ggaagcacauggugagaca

SEQ ID NO: 9028 - RNA, 19 nt, Artificial Sequence
  Synthetic
gugaauauguacuguguga

SEQ ID NO: 9029 - RNA, 19 nt, Artificial Sequence
  Synthetic
aguagaacgugaugaguca

SEQ ID NO: 9030 - RNA, 19 nt, Artificial Sequence
  Synthetic
ccugggaaguugaagacaa

SEQ ID NO: 9031 - RNA, 19 nt, Artificial Sequence
  Synthetic
aggaugagaaggugaauau

SEQ ID NO: 9032 - RNA, 19 nt, Artificial Sequence
  Synthetic
ccgaauaagaagcccuuua

SEQ ID NO: 9033 - RNA, 19 nt, Artificial Sequence
  Synthetic
acacagaacuggagacccu

SEQ ID NO: 9034 - RNA, 19 nt, Artificial Sequence
  Synthetic
cauuuaaacuggaucccaa

SEQ ID NO: 9035 - RNA, 19 nt, Artificial Sequence
  Synthetic
ccuacagacugcuaagaau

SEQ ID NO: 9036 - RNA, 19 nt, Artificial Sequence
  Synthetic
gggauaauguuggaaagaa

SEQ ID NO: 9037 - RNA, 19 nt, Artificial Sequence
  Synthetic
caccagaagugucccgaaa

SEQ ID NO: 9038 - RNA, 19 nt, Artificial Sequence
  Synthetic
gaacuagggcugcaggaau

SEQ ID NO: 9039 - RNA, 19 nt, Artificial Sequence
  Synthetic
gcacaggcuucaugagugu

SEQ ID NO: 9040 - RNA, 19 nt, Artificial Sequence
  Synthetic
gcugauagcuggaugauag

SEQ ID NO: 9041 - RNA, 19 nt, Artificial Sequence
  Synthetic
gcuaagaauaucaccgaga

SEQ ID NO: 9042 - RNA, 19 nt, Artificial Sequence
  Synthetic
gggaaguugaagacaaaca

SEQ ID NO: 9043 - RNA, 19 nt, Artificial Sequence
  Synthetic
gagcauauccugaaagaaa

SEQ ID NO: 9044 - RNA, 19 nt, Artificial Sequence
  Synthetic
agacaaagguuaugaaacu

SEQ ID NO: 9045 - RNA, 19 nt, Artificial Sequence
  Synthetic
cguuaaagccauaaaccaa

SEQ ID NO: 9046 - RNA, 19 nt, Artificial Sequence
  Synthetic
gaaugaucgauuugagaaa

SEQ ID NO: 9047 - RNA, 19 nt, Artificial Sequence
  Synthetic
ggaccaugagaaugagaaa

SEQ ID NO: 9048 - RNA, 19 nt, Artificial Sequence
  Synthetic
aggcaaaacuuauggaaga

SEQ ID NO: 9049 - RNA, 19 nt, Artificial Sequence
  Synthetic
aggaaaugcugguggaugu

SEQ ID NO: 9050 - RNA, 19 nt, Artificial Sequence
  Synthetic
gcaaaugaucgcugucaaa

SEQ ID NO: 9051 - RNA, 19 nt, Artificial Sequence
  Synthetic
agacacaacaacaaggaaa

SEQ ID NO: 9052 - RNA, 19 nt, Artificial Sequence
  Synthetic
cugcuaugcaugaggcaaa

SEQ ID NO: 9053 - RNA, 19 nt, Artificial Sequence
  Synthetic
ucaaagagacaaagguuau

SEQ ID NO: 9054 - RNA, 19 nt, Artificial Sequence
  Synthetic
gaugaaagcucucuaaaga

SEQ ID NO: 9055 - RNA, 19 nt, Artificial Sequence
  Synthetic
caaaucagcuccaaagaau

SEQ ID NO: 9056 - RNA, 19 nt, Artificial Sequence
  Synthetic
ccagagagguuuaguggca

SEQ ID NO: 9057 - RNA, 19 nt, Artificial Sequence
  Synthetic
aggcuaacuucaucaguaa

SEQ ID NO: 9058 - RNA, 19 nt, Artificial Sequence
  Synthetic
agguuaugaaacugagaaa

SEQ ID NO: 9059 - RNA, 19 nt, Artificial Sequence
  Synthetic
guaacuucguggugagaca

SEQ ID NO: 9060 - RNA, 19 nt, Artificial Sequence
  Synthetic
gauaaggaaauguaaggaa

SEQ ID NO: 9061 - RNA, 19 nt, Artificial Sequence
  Synthetic
ucaaauggccaaacuaaua

SEQ ID NO: 9062 - RNA, 19 nt, Artificial Sequence
  Synthetic
agaaugagaaagugaacau

SEQ ID NO: 9063 - RNA, 19 nt, Artificial Sequence
  Synthetic
ccaauugaucugugccuua

SEQ ID NO: 9064 - RNA, 19 nt, Artificial Sequence
  Synthetic
ggucaacaguccucaucaa

SEQ ID NO: 9065 - RNA, 19 nt, Artificial Sequence
  Synthetic
cagcagaggaagcaaauga

SEQ ID NO: 9066 - RNA, 19 nt, Artificial Sequence
  Synthetic
cuucaucguuaaagccaua

SEQ ID NO: 9067 - RNA, 19 nt, Artificial Sequence
  Synthetic
guuaugaaacugagaaagu

SEQ ID NO: 9068 - RNA, 19 nt, Artificial Sequence
  Synthetic
aaucaaauggccaaacuaa

SEQ ID NO: 9069 - RNA, 19 nt, Artificial Sequence
  Synthetic
gccagcagguugaggugaa

SEQ ID NO: 9070 - RNA, 19 nt, Artificial Sequence
  Synthetic
gugaacauguacuguguau

SEQ ID NO: 9071 - RNA, 19 nt, Artificial Sequence
  Synthetic
acgaguugguagagaucau

SEQ ID NO: 9072 - RNA, 19 nt, Artificial Sequence
  Synthetic
uggaaacacuggagucuga

SEQ ID NO: 9073 - RNA, 19 nt, Artificial Sequence
  Synthetic
uagcaaaggugaaaguuua

SEQ ID NO: 9074 - RNA, 19 nt, Artificial Sequence
  Synthetic
ggaagagacucaaggccua

SEQ ID NO: 9075 - RNA, 19 nt, Artificial Sequence
  Synthetic
gggaagaacagaaugagaa

SEQ ID NO: 9076 - RNA, 19 nt, Artificial Sequence
  Synthetic
aaugauagauguuggagaa

SEQ ID NO: 9077 - RNA, 19 nt, Artificial Sequence
  Synthetic
caucaaaggagguguauga

SEQ ID NO: 9078 - RNA, 19 nt, Artificial Sequence
  Synthetic
guguaaaguguaugugcaa

SEQ ID NO: 9079 - RNA, 19 nt, Artificial Sequence
  Synthetic
gauagauguuggagaaagu

SEQ ID NO: 9080 - RNA, 19 nt, Artificial Sequence
  Synthetic
agcugaagccacugagaaa

SEQ ID NO: 9081 - RNA, 19 nt, Artificial Sequence
  Synthetic
gaacagaaugagaagacuu

SEQ ID NO: 9082 - RNA, 19 nt, Artificial Sequence
  Synthetic
aggcuuaaacuuagaguca

SEQ ID NO: 9083 - RNA, 19 nt, Artificial Sequence
  Synthetic
gaacaucaaaggaggugua

SEQ ID NO: 9084 - RNA, 19 nt, Artificial Sequence
  Synthetic
gcaucgugcucuuguuuaa

SEQ ID NO: 9085 - RNA, 19 nt, Artificial Sequence
  Synthetic
ugaagacacuggagcagaa

SEQ ID NO: 9086 - RNA, 19 nt, Artificial Sequence
  Synthetic
gcaauuuacggguagcaaa

SEQ ID NO: 9087 - RNA, 19 nt, Artificial Sequence
  Synthetic
gagaagacuuugggacauu

SEQ ID NO: 9088 - RNA, 19 nt, Artificial Sequence
  Synthetic
ccaaagaaaaggagaggga

SEQ ID NO: 9089 - RNA, 19 nt, Artificial Sequence
  Synthetic
ccuuacaggcuuaaacuua

SEQ ID NO: 9090 - RNA, 19 nt, Artificial Sequence
  Synthetic
augagaagacuuugggaca

SEQ ID NO: 9091 - RNA, 19 nt, Artificial Sequence
  Synthetic
ccaauuaauaggauagcuu

SEQ ID NO: 9092 - RNA, 19 nt, Artificial Sequence
  Synthetic
gcacagagccugaagacac

SEQ ID NO: 9093 - RNA, 19 nt, Artificial Sequence
  Synthetic
gcuuaaacuuagagucaag

SEQ ID NO: 9094 - RNA, 19 nt, Artificial Sequence
  Synthetic
guagcaaaggugaaaguuu

SEQ ID NO: 9095 - RNA, 19 nt, Artificial Sequence
  Synthetic
caaucugacuguaaucuaa

SEQ ID NO: 9096 - RNA, 19 nt, Artificial Sequence
  Synthetic
agagggaagaacagaauga

SEQ ID NO: 9097 - RNA, 19 nt, Artificial Sequence
  Synthetic
cuacagaaguaagaccaaa

SEQ ID NO: 9098 - RNA, 19 nt, Artificial Sequence
  Synthetic
aguucaucauggagaccaa

SEQ ID NO: 9099 - RNA, 19 nt, Artificial Sequence
  Synthetic
gguuggaccugaaggaauc

SEQ ID NO: 9100 - RNA, 19 nt, Artificial Sequence
  Synthetic
aaucuaaucuguugugcuu

SEQ ID NO: 9101 - RNA, 19 nt, Artificial Sequence
  Synthetic
gcgccgugaugaugcagua

SEQ ID NO: 9102 - RNA, 19 nt, Artificial Sequence
  Synthetic
uaacagagacgcacgcauu

SEQ ID NO: 9103 - RNA, 19 nt, Artificial Sequence
  Synthetic
cagaacacugccaaguaua

SEQ ID NO: 9104 - RNA, 19 nt, Artificial Sequence
  Synthetic
ccagaacacugccaaguau

SEQ ID NO: 9105 - RNA, 19 nt, Artificial Sequence
  Synthetic
ccaggagggcucuguacaa

SEQ ID NO: 9106 - RNA, 19 nt, Artificial Sequence
  Synthetic
ggugaaugcuauugaguuu

SEQ ID NO: 9107 - RNA, 19 nt, Artificial Sequence
  Synthetic
aggaagaaucagagaaaga

SEQ ID NO: 9108 - RNA, 19 nt, Artificial Sequence
  Synthetic
caaggaagaaucagagaaa

SEQ ID NO: 9109 - RNA, 19 nt, Artificial Sequence
  Synthetic
agaaagaagagaagcagaa

SEQ ID NO: 9110 - RNA, 19 nt, Artificial Sequence
  Synthetic
cuaagcaauuugagagcaa

SEQ ID NO: 9111 - RNA, 19 nt, Artificial Sequence
  Synthetic
gugaauguguugagauuuu

SEQ ID NO: 9112 - RNA, 19 nt, Artificial Sequence
  Synthetic
gugugaauguguugagauu

SEQ ID NO: 9113 - RNA, 19 nt, Artificial Sequence
  Synthetic
ugaaauacaaggaggcaau

SEQ ID NO: 9114 - RNA, 19 nt, Artificial Sequence
  Synthetic
ggagguggucuaugagaaa

SEQ ID NO: 9115 - RNA, 19 nt, Artificial Sequence
  Synthetic
aguacuggguggaggagaa

SEQ ID NO: 9116 - RNA, 19 nt, Artificial Sequence
  Synthetic
cuacagagcuaacuacaaa

SEQ ID NO: 9117 - RNA, 19 nt, Artificial Sequence
  Synthetic
gagaggagccacagagaca

SEQ ID NO: 9118 - RNA, 19 nt, Artificial Sequence
  Synthetic
ugaaaugaauacaggcgaa

SEQ ID NO: 9119 - RNA, 19 nt, Artificial Sequence
  Synthetic
gguuagccauagagguuaa

SEQ ID NO: 9120 - RNA, 19 nt, Artificial Sequence
  Synthetic
gaagcugagucaagaaauu

SEQ ID NO: 9121 - RNA, 19 nt, Artificial Sequence
  Synthetic
gguuaaaacuaccugguua

SEQ ID NO: 9122 - RNA, 19 nt, Artificial Sequence
  Synthetic
acaaggaggcaaugagcaa

SEQ ID NO: 9123 - RNA, 19 nt, Artificial Sequence
  Synthetic
gcucagugaccaaggaaga

SEQ ID NO: 9124 - RNA, 19 nt, Artificial Sequence
  Synthetic
aaguuaaguuguuggaaga

SEQ ID NO: 9125 - RNA, 19 nt, Artificial Sequence
  Synthetic
aggaaagagagaacagcaa

SEQ ID NO: 9126 - RNA, 19 nt, Artificial Sequence
  Synthetic
cguauaguguagugugcaa

SEQ ID NO: 9127 - RNA, 19 nt, Artificial Sequence
  Synthetic
gcccagagaucgcagcaua

SEQ ID NO: 9128 - RNA, 19 nt, Artificial Sequence
  Synthetic
gaagagaagcagaaacuca

SEQ ID NO: 9129 - RNA, 19 nt, Artificial Sequence
  Synthetic
aggagaaagaagagaagca

SEQ ID NO: 9130 - RNA, 19 nt, Artificial Sequence
  Synthetic
augaugagcuggaagauuu

SEQ ID NO: 9131 - RNA, 19 nt, Artificial Sequence
  Synthetic
gcauugaggcccaugagaa

SEQ ID NO: 9132 - RNA, 19 nt, Artificial Sequence
  Synthetic
gcaaagcaguauauuggua

SEQ ID NO: 9133 - RNA, 19 nt, Artificial Sequence
  Synthetic
gcauggagguggucuauga

SEQ ID NO: 9134 - RNA, 19 nt, Artificial Sequence
  Synthetic
ggacauggugugugggauc

SEQ ID NO: 9135 - RNA, 19 nt, Artificial Sequence
  Synthetic
gagaaagaagagaagcaga

SEQ ID NO: 9136 - RNA, 19 nt, Artificial Sequence
  Synthetic
caaacaaaguggaaguaua

SEQ ID NO: 9137 - RNA, 19 nt, Artificial Sequence
  Synthetic
gggaagagugaaagauaua

SEQ ID NO: 9138 - RNA, 19 nt, Artificial Sequence
  Synthetic
ggaagguauuaguggcaaa

SEQ ID NO: 9139 - RNA, 19 nt, Artificial Sequence
  Synthetic
ggguggaagaucagaauaa

SEQ ID NO: 9140 - RNA, 19 nt, Artificial Sequence
  Synthetic
acaagaagcuuaaggauga

SEQ ID NO: 9141 - RNA, 19 nt, Artificial Sequence
  Synthetic
acaaagaguacaaagguua

SEQ ID NO: 9142 - RNA, 19 nt, Artificial Sequence
  Synthetic
caguagagguuuacaaaga

SEQ ID NO: 9143 - RNA, 19 nt, Artificial Sequence
  Synthetic
cuguaaauacuuugagcaa

SEQ ID NO: 9144 - RNA, 19 nt, Artificial Sequence
  Synthetic
agguauuaguggcaaauua

SEQ ID NO: 9145 - RNA, 19 nt, Artificial Sequence
  Synthetic
uggaagugauccuggagaa

SEQ ID NO: 9146 - RNA, 19 nt, Artificial Sequence
  Synthetic
gcaccuuucuggaguggaa

SEQ ID NO: 9147 - RNA, 19 nt, Artificial Sequence
  Synthetic
guguauuucucuaguguau

SEQ ID NO: 9148 - RNA, 19 nt, Artificial Sequence
  Synthetic
gcuagcagagccugagaaa

SEQ ID NO: 9149 - RNA, 19 nt, Artificial Sequence
  Synthetic
caaagaguacaaagguuaa

SEQ ID NO: 9150 - RNA, 19 nt, Artificial Sequence
  Synthetic
caucagaacccuaaagagu

SEQ ID NO: 9151 - RNA, 19 nt, Artificial Sequence
  Synthetic
ugagaggagauuugggauu

SEQ ID NO: 9152 - RNA, 19 nt, Artificial Sequence
  Synthetic
aguacuaccagaagggcua

SEQ ID NO: 9153 - RNA, 19 nt, Artificial Sequence
  Synthetic
gcaaagugagcgcagcaua

SEQ ID NO: 9154 - RNA, 19 nt, Artificial Sequence
  Synthetic
ggacaagaagcuuaaggau

SEQ ID NO: 9155 - RNA, 19 nt, Artificial Sequence
  Synthetic
agccgagcauggugaguaa

SEQ ID NO: 9156 - RNA, 19 nt, Artificial Sequence
  Synthetic
cagccaaggugacguguga

SEQ ID NO: 9157 - RNA, 19 nt, Artificial Sequence
  Synthetic
cauuaagucuuguccagaa

SEQ ID NO: 9158 - RNA, 19 nt, Artificial Sequence
  Synthetic
cggaaagcgugaaaagaga

SEQ ID NO: 9159 - RNA, 19 nt, Artificial Sequence
  Synthetic
gcagaucacuugcagguau

SEQ ID NO: 9160 - RNA, 19 nt, Artificial Sequence
  Synthetic
gaaggaagucagugccuau

SEQ ID NO: 9161 - RNA, 19 nt, Artificial Sequence
  Synthetic
uguauuggguggaagauca

SEQ ID NO: 9162 - RNA, 19 nt, Artificial Sequence
  Synthetic
uagaguacuuucugcuuaa

SEQ ID NO: 9163 - RNA, 19 nt, Artificial Sequence
  Synthetic
uccagaaugccgugugaua

SEQ ID NO: 9164 - RNA, 19 nt, Artificial Sequence
  Synthetic
gguauuaguggcaaauuau

SEQ ID NO: 9165 - RNA, 19 nt, Artificial Sequence
  Synthetic
uguaauuccaaguguguau

SEQ ID NO: 9166 - RNA, 19 nt, Artificial Sequence
  Synthetic
gcugaaagcugaaggucaa

SEQ ID NO: 9167 - RNA, 19 nt, Artificial Sequence
  Synthetic
gaagagaagcagaaacuua

SEQ ID NO: 9168 - RNA, 19 nt, Artificial Sequence
  Synthetic
auuaugagcuggaagaaua

SEQ ID NO: 9169 - RNA, 19 nt, Artificial Sequence
  Synthetic
gcagaaacuuauucagcaa

SEQ ID NO: 9170 - RNA, 19 nt, Artificial Sequence
  Synthetic
ccucaagcccauaaagaaa

SEQ ID NO: 9171 - RNA, 19 nt, Artificial Sequence
  Synthetic
ggaugugaguugugugaau

SEQ ID NO: 9172 - RNA, 19 nt, Artificial Sequence
  Synthetic
gugaugaacuugugauuuu

SEQ ID NO: 9173 - RNA, 19 nt, Artificial Sequence
  Synthetic
ggguggaggaggaggaaga

SEQ ID NO: 9174 - RNA, 19 nt, Artificial Sequence
  Synthetic
cauugaagcacacgagaaa

SEQ ID NO: 9175 - RNA, 19 nt, Artificial Sequence
  Synthetic
ugaagacccucaagaguaa

SEQ ID NO: 9176 - RNA, 19 nt, Artificial Sequence
  Synthetic
gagaagugccagacaguuu

SEQ ID NO: 9177 - RNA, 19 nt, Artificial Sequence
  Synthetic
uaaauguggcagagugaaa

SEQ ID NO: 9178 - RNA, 19 nt, Artificial Sequence
  Synthetic
caacaaggccugcagguau

SEQ ID NO: 9179 - RNA, 19 nt, Artificial Sequence
  Synthetic
gcacagaagccaguaauua

SEQ ID NO: 9180 - RNA, 19 nt, Artificial Sequence
  Synthetic
ucuuugaagccgagagaga

SEQ ID NO: 9181 - RNA, 19 nt, Artificial Sequence
  Synthetic
cuguuuagcuugacaugaa

SEQ ID NO: 9182 - RNA, 19 nt, Artificial Sequence
  Synthetic
gcauugaagcacacgagaa

SEQ ID NO: 9183 - RNA, 19 nt, Artificial Sequence
  Synthetic
ccaaagcagccauggaaga

SEQ ID NO: 9184 - RNA, 19 nt, Artificial Sequence
  Synthetic
aggaggaagagaagcagaa

SEQ ID NO: 9185 - RNA, 19 nt, Artificial Sequence
  Synthetic
aggaagagaagcagaaacu

SEQ ID NO: 9186 - RNA, 19 nt, Artificial Sequence
  Synthetic
gcauggagguugucuauga

SEQ ID NO: 9187 - RNA, 19 nt, Artificial Sequence
  Synthetic
uggaggaggaggaagagaa

SEQ ID NO: 9188 - RNA, 19 nt, Artificial Sequence
  Synthetic
uggaggagcagguguagaa

SEQ ID NO: 9189 - RNA, 19 nt, Artificial Sequence
  Synthetic
aggaggaggaagagaagca

SEQ ID NO: 9190 - RNA, 19 nt, Artificial Sequence
  Synthetic
agcaauacaaggaggcaau

SEQ ID NO: 9191 - RNA, 19 nt, Artificial Sequence
  Synthetic
ggucuagucugcugagguu

SEQ ID NO: 9192 - RNA, 19 nt, Artificial Sequence
  Synthetic
guuaaacugugaugaacuu

SEQ ID NO: 9193 - RNA, 19 nt, Artificial Sequence
  Synthetic
gaagcacacgagaaagaua

SEQ ID NO: 9194 - RNA, 19 nt, Artificial Sequence
  Synthetic
ggacuuacaaagcacuaua

SEQ ID NO: 9195 - RNA, 19 nt, Artificial Sequence
  Synthetic
ggacaaauuugcugcagaa

SEQ ID NO: 9196 - RNA, 19 nt, Artificial Sequence
  Synthetic
ggagcaaacuggagggcau

SEQ ID NO: 9197 - RNA, 19 nt, Artificial Sequence
  Synthetic
cggagugguuugagaacua

SEQ ID NO: 9198 - RNA, 19 nt, Artificial Sequence
  Synthetic
agaaggagcugcagaagaa

SEQ ID NO: 9199 - RNA, 19 nt, Artificial Sequence
  Synthetic
aaacagagcuggagaagca

SEQ ID NO: 9200 - RNA, 19 nt, Artificial Sequence
  Synthetic
gggacgaggugaagcaaau

SEQ ID NO: 9201 - RNA, 19 nt, Artificial Sequence
  Synthetic
agccaaaccacuagggaaa

SEQ ID NO: 9202 - RNA, 19 nt, Artificial Sequence
  Synthetic
ccacaaggcccuagaggau

SEQ ID NO: 9203 - RNA, 19 nt, Artificial Sequence
  Synthetic
gaaagggcacugagggaua

SEQ ID NO: 9204 - RNA, 19 nt, Artificial Sequence
  Synthetic
gggagaaggaugaggaguu

SEQ ID NO: 9205 - RNA, 19 nt, Artificial Sequence
  Synthetic
ccaagaauaaccugaguaa

SEQ ID NO: 9206 - RNA, 19 nt, Artificial Sequence
  Synthetic
guaaggaggaggaggaaga

SEQ ID NO: 9207 - RNA, 19 nt, Artificial Sequence
  Synthetic
cgagauggagacugagaaa

SEQ ID NO: 9208 - RNA, 19 nt, Artificial Sequence
  Synthetic
ucaugaagcucuggagaaa

SEQ ID NO: 9209 - RNA, 19 nt, Artificial Sequence
  Synthetic
uuacagagcagcagagcaa

SEQ ID NO: 9210 - RNA, 19 nt, Artificial Sequence
  Synthetic
ccgaauaaacaaugaacau

SEQ ID NO: 9211 - RNA, 19 nt, Artificial Sequence
  Synthetic
gcaugaagccgcagcaauu

SEQ ID NO: 9212 - RNA, 19 nt, Artificial Sequence
  Synthetic
auacagaccuggacaaauu

SEQ ID NO: 9213 - RNA, 19 nt, Artificial Sequence
  Synthetic
ggaacaagcagcagcaaca

SEQ ID NO: 9214 - RNA, 19 nt, Artificial Sequence
  Synthetic
gggaaguggcagaguuuau

SEQ ID NO: 9215 - RNA, 19 nt, Artificial Sequence
  Synthetic
gggaugagcuagacaagau

SEQ ID NO: 9216 - RNA, 19 nt, Artificial Sequence
  Synthetic
gggcaaagaaugugcaacu

SEQ ID NO: 9217 - RNA, 19 nt, Artificial Sequence
  Synthetic
gugaauggcagaauaguua

SEQ ID NO: 9218 - RNA, 19 nt, Artificial Sequence
  Synthetic
cgacauagcccguaagacu

SEQ ID NO: 9219 - RNA, 19 nt, Artificial Sequence
  Synthetic
aaagagaccuucacaauua

SEQ ID NO: 9220 - RNA, 19 nt, Artificial Sequence
  Synthetic
gggaaugacucuaagaugu

SEQ ID NO: 9221 - RNA, 19 nt, Artificial Sequence
  Synthetic
guacagaaggcaagcgaca

SEQ ID NO: 9222 - RNA, 19 nt, Artificial Sequence
  Synthetic
ggccaagggugaugaugaa

SEQ ID NO: 9223 - RNA, 19 nt, Artificial Sequence
  Synthetic
agauauugcagaugaagaa

SEQ ID NO: 9224 - RNA, 19 nt, Artificial Sequence
  Synthetic
ggacagagcaugaugggca

SEQ ID NO: 9225 - RNA, 19 nt, Artificial Sequence
  Synthetic
guacagaauuagagaacaa

SEQ ID NO: 9226 - RNA, 19 nt, Artificial Sequence
  Synthetic
guaguaagguagaaggaaa

SEQ ID NO: 9227 - RNA, 19 nt, Artificial Sequence
  Synthetic
ggguagaauuugaugacaa

SEQ ID NO: 9228 - RNA, 19 nt, Artificial Sequence
  Synthetic
cggcagaaguuacgugaaa

SEQ ID NO: 9229 - RNA, 19 nt, Artificial Sequence
  Synthetic
cugaagaacuugcuggaaa

SEQ ID NO: 9230 - RNA, 19 nt, Artificial Sequence
  Synthetic
gaacaggaauggaaauuua

SEQ ID NO: 9231 - RNA, 19 nt, Artificial Sequence
  Synthetic
ggaaugaacuucugaaaca

SEQ ID NO: 9232 - RNA, 19 nt, Artificial Sequence
  Synthetic
gaacuuaaauacugaggaa

SEQ ID NO: 9233 - RNA, 19 nt, Artificial Sequence
  Synthetic
ccaagcagauacagagaaa

SEQ ID NO: 9234 - RNA, 19 nt, Artificial Sequence
  Synthetic
ggucacagauggagcaauu

SEQ ID NO: 9235 - RNA, 19 nt, Artificial Sequence
  Synthetic
gcaaagagaaucagaacau

SEQ ID NO: 9236 - RNA, 19 nt, Artificial Sequence
  Synthetic
gagaacagcaagagagaca

SEQ ID NO: 9237 - RNA, 19 nt, Artificial Sequence
  Synthetic
ugauauaaucccagaggaa

SEQ ID NO: 9238 - RNA, 19 nt, Artificial Sequence
  Synthetic
ccuaaaggugucugggaua

SEQ ID NO: 9239 - RNA, 19 nt, Artificial Sequence
  Synthetic
cgacuuaccuugugauuuu

SEQ ID NO: 9240 - RNA, 19 nt, Artificial Sequence
  Synthetic
gaugaaaacugaauggaaa

SEQ ID NO: 9241 - RNA, 19 nt, Artificial Sequence
  Synthetic
uggaaaagccggaguguua

SEQ ID NO: 9242 - RNA, 19 nt, Artificial Sequence
  Synthetic
ccagcuauguacagaauua

SEQ ID NO: 9243 - RNA, 19 nt, Artificial Sequence
  Synthetic
gauaaguaguaguaggaca

SEQ ID NO: 9244 - RNA, 19 nt, Artificial Sequence
  Synthetic
ggaugauagucgagaagga

SEQ ID NO: 9245 - RNA, 19 nt, Artificial Sequence
  Synthetic
agaggaagaugcagaacaa

SEQ ID NO: 9246 - RNA, 19 nt, Artificial Sequence
  Synthetic
gcaagaugcuaguguguga

SEQ ID NO: 9247 - RNA, 19 nt, Artificial Sequence
  Synthetic
ugaaggaacuggauguuaa

SEQ ID NO: 9248 - RNA, 19 nt, Artificial Sequence
  Synthetic
aggaacagauggugucaaa

SEQ ID NO: 9249 - RNA, 19 nt, Artificial Sequence
  Synthetic
caaaggagacucagggaau

SEQ ID NO: 9250 - RNA, 19 nt, Artificial Sequence
  Synthetic
caucagauuucuaggccua

SEQ ID NO: 9251 - RNA, 19 nt, Artificial Sequence
  Synthetic
cgaaguagccaacaggaaa

SEQ ID NO: 9252 - RNA, 19 nt, Artificial Sequence
  Synthetic
gcccaaagacuaucggaaa

SEQ ID NO: 9253 - RNA, 19 nt, Artificial Sequence
  Synthetic
ggaaguggaugaacugaaa

SEQ ID NO: 9254 - RNA, 19 nt, Artificial Sequence
  Synthetic
ugaccaagcuccugaaaga

SEQ ID NO: 9255 - RNA, 19 nt, Artificial Sequence
  Synthetic
cggaaaaggaagaggcaaa

SEQ ID NO: 9256 - RNA, 19 nt, Artificial Sequence
  Synthetic
gaagaaagaagaagaagaa

SEQ ID NO: 9257 - RNA, 19 nt, Artificial Sequence
  Synthetic
aggaagaagagaagaaaga

SEQ ID NO: 9258 - RNA, 19 nt, Artificial Sequence
  Synthetic
ccaaagaagcugugggugu

SEQ ID NO: 9259 - RNA, 19 nt, Artificial Sequence
  Synthetic
aggucaaggucaaggucaa

SEQ ID NO: 9260 - RNA, 19 nt, Artificial Sequence
  Synthetic
cgaaucaggucaaggucaa

SEQ ID NO: 9261 - RNA, 19 nt, Artificial Sequence
  Synthetic
aggaggaguuucaggguuu

SEQ ID NO: 9262 - RNA, 19 nt, Artificial Sequence
  Synthetic
gagccaaagugcagcuauu

SEQ ID NO: 9263 - RNA, 19 nt, Artificial Sequence
  Synthetic
gcaucaacuucaagcggaa

SEQ ID NO: 9264 - RNA, 19 nt, Artificial Sequence
  Synthetic
agaagaaagaagaagaaga

SEQ ID NO: 9265 - RNA, 19 nt, Artificial Sequence
  Synthetic
acgaggaagaagagaagaa

SEQ ID NO: 9266 - RNA, 19 nt, Artificial Sequence
  Synthetic
cgguggaagcuaagagaga

SEQ ID NO: 9267 - RNA, 19 nt, Artificial Sequence
  Synthetic
gcguugaggcagagagcuu

SEQ ID NO: 9268 - RNA, 19 nt, Artificial Sequence
  Synthetic
gugaugaggaagaggauga

SEQ ID NO: 9269 - RNA, 19 nt, Artificial Sequence
  Synthetic
ggagaagagaaggaagaaa

SEQ ID NO: 9270 - RNA, 19 nt, Artificial Sequence
  Synthetic
agagaagaaagaagaagaa

SEQ ID NO: 9271 - RNA, 19 nt, Artificial Sequence
  Synthetic
cagcagcauuccagggcaa

SEQ ID NO: 9272 - RNA, 19 nt, Artificial Sequence
  Synthetic
ggguagaggagaagauguu

SEQ ID NO: 9273 - RNA, 19 nt, Artificial Sequence
  Synthetic
agggagaagagaaggaaga

SEQ ID NO: 9274 - RNA, 19 nt, Artificial Sequence
  Synthetic
gcccagacuucgaggacau

SEQ ID NO: 9275 - RNA, 19 nt, Artificial Sequence
  Synthetic
gcuacgugcuccaggaaga

SEQ ID NO: 9276 - RNA, 19 nt, Artificial Sequence
  Synthetic
acaacgacuaugagagcaa

SEQ ID NO: 9277 - RNA, 19 nt, Artificial Sequence
  Synthetic
gaaucaaagugcccaacua

SEQ ID NO: 9278 - RNA, 19 nt, Artificial Sequence
  Synthetic
uaaggaggauugugauuua

SEQ ID NO: 9279 - RNA, 19 nt, Artificial Sequence
  Synthetic
ggcaaguauuugugaagau

SEQ ID NO: 9280 - RNA, 19 nt, Artificial Sequence
  Synthetic
aagcaguagugguggcaga

SEQ ID NO: 9281 - RNA, 19 nt, Artificial Sequence
  Synthetic
gaaggaagaaagagcugua

SEQ ID NO: 9282 - RNA, 19 nt, Artificial Sequence
  Synthetic
ggauugugauuuagagaac

SEQ ID NO: 9283 - RNA, 19 nt, Artificial Sequence
  Synthetic
aagaagagaagaaagaaga

SEQ ID NO: 9284 - RNA, 19 nt, Artificial Sequence
  Synthetic
aggaagaggaugaggugca

SEQ ID NO: 9285 - RNA, 19 nt, Artificial Sequence
  Synthetic
ggauaaacaucaugagaaa

SEQ ID NO: 9286 - RNA, 19 nt, Artificial Sequence
  Synthetic
ggacaaacacaaacagaaa

SEQ ID NO: 9287 - RNA, 19 nt, Artificial Sequence
  Synthetic
agaagaaacuguaaaggaa

SEQ ID NO: 9288 - RNA, 19 nt, Artificial Sequence
  Synthetic
gccuguagcucaagagaaa

SEQ ID NO: 9289 - RNA, 19 nt, Artificial Sequence
  Synthetic
agauaaugcaagucagaaa

SEQ ID NO: 9290 - RNA, 19 nt, Artificial Sequence
  Synthetic
gcucaggaauggaaguuua

SEQ ID NO: 9291 - RNA, 19 nt, Artificial Sequence
  Synthetic
cagcaaugauguagcagua

SEQ ID NO: 9292 - RNA, 19 nt, Artificial Sequence
  Synthetic
gcacacaccucuaguggaa

SEQ ID NO: 9293 - RNA, 19 nt, Artificial Sequence
  Synthetic
gaagaaacgcaacaagaaa

SEQ ID NO: 9294 - RNA, 19 nt, Artificial Sequence
  Synthetic
gaagaaacuguaaaggaaa

SEQ ID NO: 9295 - RNA, 19 nt, Artificial Sequence
  Synthetic
ggucagagggcaaagggaa

SEQ ID NO: 9296 - RNA, 19 nt, Artificial Sequence
  Synthetic
guagcaagacuuagugaua

SEQ ID NO: 9297 - RNA, 19 nt, Artificial Sequence
  Synthetic
caaccaaagauguacauaa

SEQ ID NO: 9298 - RNA, 19 nt, Artificial Sequence
  Synthetic
ggcucaaacuucuggcaua

SEQ ID NO: 9299 - RNA, 19 nt, Artificial Sequence
  Synthetic
ggucauaugaucaaaguuu

SEQ ID NO: 9300 - RNA, 19 nt, Artificial Sequence
  Synthetic
gaaaagaaaaggaaaggaa

SEQ ID NO: 9301 - RNA, 19 nt, Artificial Sequence
  Synthetic
gaugaacaaggaagagaaa

SEQ ID NO: 9302 - RNA, 19 nt, Artificial Sequence
  Synthetic
aaaccgaagauuagaggaa

SEQ ID NO: 9303 - RNA, 19 nt, Artificial Sequence
  Synthetic
cuagagggucagagggcaa

SEQ ID NO: 9304 - RNA, 19 nt, Artificial Sequence
  Synthetic
ggaagaaauccaggaacaa

SEQ ID NO: 9305 - RNA, 19 nt, Artificial Sequence
  Synthetic
uaacagugccucaggacua

SEQ ID NO: 9306 - RNA, 19 nt, Artificial Sequence
  Synthetic
caacaaggcucaggaguga

SEQ ID NO: 9307 - RNA, 19 nt, Artificial Sequence
  Synthetic
ggugacaguucuacacuaa

SEQ ID NO: 9308 - RNA, 19 nt, Artificial Sequence
  Synthetic
cggacugcuuugugaagaa

SEQ ID NO: 9309 - RNA, 19 nt, Artificial Sequence
  Synthetic
caguaagagcccucauaua

SEQ ID NO: 9310 - RNA, 19 nt, Artificial Sequence
  Synthetic
ccgcaugaucguuauaaua

SEQ ID NO: 9311 - RNA, 19 nt, Artificial Sequence
  Synthetic
ggagaugauuggaggcugu

SEQ ID NO: 9312 - RNA, 19 nt, Artificial Sequence
  Synthetic
gaagauuagaggaacaaau

SEQ ID NO: 9313 - RNA, 19 nt, Artificial Sequence
  Synthetic
uggcauuguaggagcuuua

SEQ ID NO: 9314 - RNA, 19 nt, Artificial Sequence
  Synthetic
acaucaugagaaagagaaa

SEQ ID NO: 9315 - RNA, 19 nt, Artificial Sequence
  Synthetic
gcaaauaccacuucagcaa

SEQ ID NO: 9316 - RNA, 19 nt, Artificial Sequence
  Synthetic
agacaggccugaaggagaa

SEQ ID NO: 9317 - RNA, 19 nt, Artificial Sequence
  Synthetic
gcauugaagaggacugaua

SEQ ID NO: 9318 - RNA, 19 nt, Artificial Sequence
  Synthetic
agccauagccugagucaua

SEQ ID NO: 9319 - RNA, 19 nt, Artificial Sequence
  Synthetic
gcaagagcccuccgggaaa

SEQ ID NO: 9320 - RNA, 19 nt, Artificial Sequence
  Synthetic
uuacagagcagcagagaca

SEQ ID NO: 9321 - RNA, 19 nt, Artificial Sequence
  Synthetic
gcgucaacaucguggagau

SEQ ID NO: 9322 - RNA, 19 nt, Artificial Sequence
  Synthetic
gggaaaggugugagcaguu

SEQ ID NO: 9323 - RNA, 19 nt, Artificial Sequence
  Synthetic
gagaagaagcacaaagcca

SEQ ID NO: 9324 - RNA, 19 nt, Artificial Sequence
  Synthetic
gagacaggccugaaggaga

SEQ ID NO: 9325 - RNA, 19 nt, Artificial Sequence
  Synthetic
cauaaagggaagaaacuga

SEQ ID NO: 9326 - RNA, 19 nt, Artificial Sequence
  Synthetic
ggccagaagaagagucgaa

SEQ ID NO: 9327 - RNA, 19 nt, Artificial Sequence
  Synthetic
gagcagauccugagccuga

SEQ ID NO: 9328 - RNA, 19 nt, Artificial Sequence
  Synthetic
aagaagagucgaaaggaca

SEQ ID NO: 9329 - RNA, 19 nt, Artificial Sequence
  Synthetic
aagaagugcuggaggugga

SEQ ID NO: 9330 - RNA, 19 nt, Artificial Sequence
  Synthetic
ugaaggagaagaagcacaa

SEQ ID NO: 9331 - RNA, 19 nt, Artificial Sequence
  Synthetic
ccgagaacccgcuggucua

SEQ ID NO: 9332 - RNA, 19 nt, Artificial Sequence
  Synthetic
aggaagaagugcuggaggu

SEQ ID NO: 9333 - RNA, 19 nt, Artificial Sequence
  Synthetic
gccuuaagcagaagcacaa

SEQ ID NO: 9334 - RNA, 19 nt, Artificial Sequence
  Synthetic
aggagggaccgcugacaaa

SEQ ID NO: 9335 - RNA, 19 nt, Artificial Sequence
  Synthetic
guaggaggcugcugcguau

SEQ ID NO: 9336 - RNA, 19 nt, Artificial Sequence
  Synthetic
agccagaggaggacaagua

SEQ ID NO: 9337 - RNA, 19 nt, Artificial Sequence
  Synthetic
agaagagucgaaaggacaa

SEQ ID NO: 9338 - RNA, 19 nt, Artificial Sequence
  Synthetic
gaagaagagucgaaaggac

SEQ ID NO: 9339 - RNA, 19 nt, Artificial Sequence
  Synthetic
ccgccauggaugucgacaa

SEQ ID NO: 9340 - RNA, 19 nt, Artificial Sequence
  Synthetic
cgacuaacauggagcagcu

SEQ ID NO: 9341 - RNA, 19 nt, Artificial Sequence
  Synthetic
aagaacgccuuaagcagaa

SEQ ID NO: 9342 - RNA, 19 nt, Artificial Sequence
  Synthetic
cugaaggagaagaagcaca

SEQ ID NO: 9343 - RNA, 19 nt, Artificial Sequence
  Synthetic
agucauaaagggaagaaac

SEQ ID NO: 9344 - RNA, 19 nt, Artificial Sequence
  Synthetic
ccacgcagcaggagaagca

SEQ ID NO: 9345 - RNA, 19 nt, Artificial Sequence
  Synthetic
acuaagaaauggagaggua

SEQ ID NO: 9346 - RNA, 19 nt, Artificial Sequence
  Synthetic
ggaagaaggucguguaaga

SEQ ID NO: 9347 - RNA, 19 nt, Artificial Sequence
  Synthetic
ccgugaagaaagugggaaa

SEQ ID NO: 9348 - RNA, 19 nt, Artificial Sequence
  Synthetic
ccaaagaugucauugcuaa

SEQ ID NO: 9349 - RNA, 19 nt, Artificial Sequence
  Synthetic
gggaaagguuggcgcuaau

SEQ ID NO: 9350 - RNA, 19 nt, Artificial Sequence
  Synthetic
uaagaaauggagagguaaa

SEQ ID NO: 9351 - RNA, 19 nt, Artificial Sequence
  Synthetic
caaagaguguccaggaauu

SEQ ID NO: 9352 - RNA, 19 nt, Artificial Sequence
  Synthetic
cauaggaaguacugaaaca

SEQ ID NO: 9353 - RNA, 19 nt, Artificial Sequence
  Synthetic
aggaagagcuugaaaagua

SEQ ID NO: 9354 - RNA, 19 nt, Artificial Sequence
  Synthetic
ccaagugagccaaggacaa

SEQ ID NO: 9355 - RNA, 19 nt, Artificial Sequence
  Synthetic
cagacaucuuugcgggaaa

SEQ ID NO: 9356 - RNA, 19 nt, Artificial Sequence
  Synthetic
aagcaaggaaauugaacua

SEQ ID NO: 9357 - RNA, 19 nt, Artificial Sequence
  Synthetic
gcuucuuguuuuaagguua

SEQ ID NO: 9358 - RNA, 19 nt, Artificial Sequence
  Synthetic
gcagauaagaagaaagcca

SEQ ID NO: 9359 - RNA, 19 nt, Artificial Sequence
  Synthetic
gauucaagguggaguucau

SEQ ID NO: 9360 - RNA, 19 nt, Artificial Sequence
  Synthetic
gaagaaagugggaaagguu

SEQ ID NO: 9361 - RNA, 19 nt, Artificial Sequence
  Synthetic
auuuagagcuucuugcaaa

SEQ ID NO: 9362 - RNA, 19 nt, Artificial Sequence
  Synthetic
gaucaaugccacuguaaga

SEQ ID NO: 9363 - RNA, 19 nt, Artificial Sequence
  Synthetic
gcuacagucuccagaguca

SEQ ID NO: 9364 - RNA, 19 nt, Artificial Sequence
  Synthetic
gaaauggagagguaaagaa

SEQ ID NO: 9365 - RNA, 19 nt, Artificial Sequence
  Synthetic
gcaaagaguguccaggaau

SEQ ID NO: 9366 - RNA, 19 nt, Artificial Sequence
  Synthetic
aaauggagagguaaagaaa

SEQ ID NO: 9367 - RNA, 19 nt, Artificial Sequence
  Synthetic
uugcaaacauagacccuaa

SEQ ID NO: 9368 - RNA, 19 nt, Artificial Sequence
  Synthetic
augcaaugguagcuguuaa

SEQ ID NO: 9369 - RNA, 19 nt, Artificial Sequence
  Synthetic
gagaaggacaaaagaagaa

SEQ ID NO: 9370 - RNA, 19 nt, Artificial Sequence
  Synthetic
aggaggaauuucggaguua

SEQ ID NO: 9371 - RNA, 19 nt, Artificial Sequence
  Synthetic
cagagaacaugaugcccaa

SEQ ID NO: 9372 - RNA, 19 nt, Artificial Sequence
  Synthetic
uacugaaacaacagggaaa

SEQ ID NO: 9373 - RNA, 19 nt, Artificial Sequence
  Synthetic
cgggaaagauauaacucau

SEQ ID NO: 9374 - RNA, 19 nt, Artificial Sequence
  Synthetic
aaguaucgauuaaggaaca

SEQ ID NO: 9375 - RNA, 19 nt, Artificial Sequence
  Synthetic
uggaagaaguggaagaaau

SEQ ID NO: 9376 - RNA, 19 nt, Artificial Sequence
  Synthetic
ggaagaaguggaagaaauu

SEQ ID NO: 9377 - RNA, 19 nt, Artificial Sequence
  Synthetic
agaaaugcaacuugagaaa

SEQ ID NO: 9378 - RNA, 19 nt, Artificial Sequence
  Synthetic
ggaccuugcuggaggcuau

SEQ ID NO: 9379 - RNA, 19 nt, Artificial Sequence
  Synthetic
gcuaggaagacuuggguau

SEQ ID NO: 9380 - RNA, 19 nt, Artificial Sequence
  Synthetic
cuuuagaaguggaacgaca

SEQ ID NO: 9381 - RNA, 19 nt, Artificial Sequence
  Synthetic
ggaagaagcuuuagaagug

SEQ ID NO: 9382 - RNA, 19 nt, Artificial Sequence
  Synthetic
cugugaaaguuguguagau

SEQ ID NO: 9383 - RNA, 19 nt, Artificial Sequence
  Synthetic
uguuugagguugugacaga

SEQ ID NO: 9384 - RNA, 19 nt, Artificial Sequence
  Synthetic
ugaccaacaauguggauuu

SEQ ID NO: 9385 - RNA, 19 nt, Artificial Sequence
  Synthetic
acaauguggauuuggacaa

SEQ ID NO: 9386 - RNA, 19 nt, Artificial Sequence
  Synthetic
gagauauaccaaaaggaaa

SEQ ID NO: 9387 - RNA, 19 nt, Artificial Sequence
  Synthetic
aagaagcucuguaugaaua

SEQ ID NO: 9388 - RNA, 19 nt, Artificial Sequence
  Synthetic
ggaaaaugaacaaagaaga

SEQ ID NO: 9389 - RNA, 19 nt, Artificial Sequence
  Synthetic
caauaaaagggaagaagau

SEQ ID NO: 9390 - RNA, 19 nt, Artificial Sequence
  Synthetic
gaaccagggagcuagcaaa

SEQ ID NO: 9391 - RNA, 19 nt, Artificial Sequence
  Synthetic
gaagauuuuccuagucuaa

SEQ ID NO: 9392 - RNA, 19 nt, Artificial Sequence
  Synthetic
uagaugagcuggagaguuc

SEQ ID NO: 9393 - RNA, 19 nt, Artificial Sequence
  Synthetic
ucacagagcacuacaggau

SEQ ID NO: 9394 - RNA, 19 nt, Artificial Sequence
  Synthetic
cacugcagauagagacaua

SEQ ID NO: 9395 - RNA, 19 nt, Artificial Sequence
  Synthetic
caaaaugggucaacauauu

SEQ ID NO: 9396 - RNA, 19 nt, Artificial Sequence
  Synthetic
gcuugagaugcuaggaaga

SEQ ID NO: 9397 - RNA, 19 nt, Artificial Sequence
  Synthetic
aggaagaacuggaagaagc

SEQ ID NO: 9398 - RNA, 19 nt, Artificial Sequence
  Synthetic
cagcuguguuaaaguauuu

SEQ ID NO: 9399 - RNA, 19 nt, Artificial Sequence
  Synthetic
ggagauauaccaaaaggaa

SEQ ID NO: 9400 - RNA, 19 nt, Artificial Sequence
  Synthetic
uggaagaagcuuuagaagu

SEQ ID NO: 9401 - RNA, 19 nt, Artificial Sequence
  Synthetic
aauuaaagcugacucgaga

SEQ ID NO: 9402 - RNA, 19 nt, Artificial Sequence
  Synthetic
agaaguggaacgacaggaa

SEQ ID NO: 9403 - RNA, 19 nt, Artificial Sequence
  Synthetic
gaagaagcucuguaugaau

SEQ ID NO: 9404 - RNA, 19 nt, Artificial Sequence
  Synthetic
uuuccuagucuaagagaau

SEQ ID NO: 9405 - RNA, 19 nt, Artificial Sequence
  Synthetic
ggaaagcagcugugagaaa

SEQ ID NO: 9406 - RNA, 19 nt, Artificial Sequence
  Synthetic
ggaaacaauaggagaggaa

SEQ ID NO: 9407 - RNA, 19 nt, Artificial Sequence
  Synthetic
gaucaaagccgauaugaaa

SEQ ID NO: 9408 - RNA, 19 nt, Artificial Sequence
  Synthetic
cuuuauaugaaguggguaa

SEQ ID NO: 9409 - RNA, 19 nt, Artificial Sequence
  Synthetic
aaacaauaggagaggaaau

SEQ ID NO: 9410 - RNA, 19 nt, Artificial Sequence
  Synthetic
ggauauuccugaaaagaaa

SEQ ID NO: 9411 - RNA, 19 nt, Artificial Sequence
  Synthetic
cuacagagcagaauggcua

SEQ ID NO: 9412 - RNA, 19 nt, Artificial Sequence
  Synthetic
acucagacgaggagaauga

SEQ ID NO: 9413 - RNA, 19 nt, Artificial Sequence
  Synthetic
gaggaaagcagcugugaga

SEQ ID NO: 9414 - RNA, 19 nt, Artificial Sequence
  Synthetic
ggagaaugacuuucggcaa

SEQ ID NO: 9415 - RNA, 19 nt, Artificial Sequence
  Synthetic
augaaagcagcuagggaua

SEQ ID NO: 9416 - RNA, 19 nt, Artificial Sequence
  Synthetic
gagaaaggcugucagguca

SEQ ID NO: 9417 - RNA, 19 nt, Artificial Sequence
  Synthetic
ccgccagcacagugggaaa

SEQ ID NO: 9418 - RNA, 19 nt, Artificial Sequence
  Synthetic
cagaauggcuaaugcggau

SEQ ID NO: 9419 - RNA, 19 nt, Artificial Sequence
  Synthetic
cgauaauaaugcccagaau

SEQ ID NO: 9420 - RNA, 19 nt, Artificial Sequence
  Synthetic
gaguaaagccaaugaagaa

SEQ ID NO: 9421 - RNA, 19 nt, Artificial Sequence
  Synthetic
aaagaaagagugugagaaa

SEQ ID NO: 9422 - RNA, 19 nt, Artificial Sequence
  Synthetic
gaauguuaguucugggaaa

SEQ ID NO: 9423 - RNA, 19 nt, Artificial Sequence
  Synthetic
gcaaauuagcagaguguau

SEQ ID NO: 9424 - RNA, 19 nt, Artificial Sequence
  Synthetic
ccgauaugcugguggacaa

SEQ ID NO: 9425 - RNA, 19 nt, Artificial Sequence
  Synthetic
acagaaaccuuuugggaau

SEQ ID NO: 9426 - RNA, 19 nt, Artificial Sequence
  Synthetic
ggucaagaggcaagacaaa

SEQ ID NO: 9427 - RNA, 19 nt, Artificial Sequence
  Synthetic
uagaagcacuugagggaaa

SEQ ID NO: 9428 - RNA, 19 nt, Artificial Sequence
  Synthetic
aggagaagauggagaauca

SEQ ID NO: 9429 - RNA, 19 nt, Artificial Sequence
  Synthetic
uugaagagccagagagcaa

SEQ ID NO: 9430 - RNA, 19 nt, Artificial Sequence
  Synthetic
gagaaaggagacuggaaua

SEQ ID NO: 9431 - RNA, 19 nt, Artificial Sequence
  Synthetic
agauggaaguggagaaaga

SEQ ID NO: 9432 - RNA, 19 nt, Artificial Sequence
  Synthetic
cagcaaauggaaagauaua

SEQ ID NO: 9433 - RNA, 19 nt, Artificial Sequence
  Synthetic
aguaggaggaccagagaaa

SEQ ID NO: 9434 - RNA, 19 nt, Artificial Sequence
  Synthetic
guuuggagguagaggagaa

SEQ ID NO: 9435 - RNA, 19 nt, Artificial Sequence
  Synthetic
agaagaagaccuugaaauu

SEQ ID NO: 9436 - RNA, 19 nt, Artificial Sequence
  Synthetic
ggugaaaguuuauggcuaa

SEQ ID NO: 9437 - RNA, 19 nt, Artificial Sequence
  Synthetic
aggugaaaguuuauggcua

SEQ ID NO: 9438 - RNA, 19 nt, Artificial Sequence
  Synthetic
ggguuggaccugaaggaau

SEQ ID NO: 9439 - RNA, 19 nt, Artificial Sequence
  Synthetic
caaaggagguguaugacca

SEQ ID NO: 9440 - RNA, 19 nt, Artificial Sequence
  Synthetic
uggcauucugugcgggaua

SEQ ID NO: 9441 - RNA, 19 nt, Artificial Sequence
  Synthetic
caggagcagacuaggcaua

SEQ ID NO: 9442 - RNA, 19 nt, Artificial Sequence
  Synthetic
ggacugcaguuuacgggua

SEQ ID NO: 9443 - RNA, 19 nt, Artificial Sequence
  Synthetic
gaaucauagaaguugacua

SEQ ID NO: 9444 - RNA, 19 nt, Artificial Sequence
  Synthetic
agucaggaaagaauguaua

SEQ ID NO: 9445 - RNA, 19 nt, Artificial Sequence
  Synthetic
gcaguuuacggguagcaaa

SEQ ID NO: 9446 - RNA, 19 nt, Artificial Sequence
  Synthetic
ggaauaaaguggaugacua

SEQ ID NO: 9447 - RNA, 19 nt, Artificial Sequence
  Synthetic
caacauaaauacagcaaga

SEQ ID NO: 9448 - RNA, 19 nt, Artificial Sequence
  Synthetic
uugcagaacuugaagcuaa

SEQ ID NO: 9449 - RNA, 19 nt, Artificial Sequence
  Synthetic
ggaaauaugucugaguuua

SEQ ID NO: 9450 - RNA, 19 nt, Artificial Sequence
  Synthetic
gggaaauaugucugaguuu

SEQ ID NO: 9451 - RNA, 19 nt, Artificial Sequence
  Synthetic
caaguaaacugaagcguga

SEQ ID NO: 9452 - RNA, 19 nt, Artificial Sequence
  Synthetic
caucaaacguuaugccaga

SEQ ID NO: 9453 - RNA, 19 nt, Artificial Sequence
  Synthetic
gcucauuguagauggagaa

SEQ ID NO: 9454 - RNA, 19 nt, Artificial Sequence
  Synthetic
aaggaggacuuccggaaua

SEQ ID NO: 9455 - RNA, 19 nt, Artificial Sequence
  Synthetic
caugaaacagcaagaggua

SEQ ID NO: 9456 - RNA, 19 nt, Artificial Sequence
  Synthetic
cugaagaguugucugcuua

SEQ ID NO: 9457 - RNA, 19 nt, Artificial Sequence
  Synthetic
gugaaaugccugaccaaga

SEQ ID NO: 9458 - RNA, 19 nt, Artificial Sequence
  Synthetic
gaauauugaagcugcagaa

SEQ ID NO: 9459 - RNA, 19 nt, Artificial Sequence
  Synthetic
uauugaagcugcagaacau

SEQ ID NO: 9460 - RNA, 19 nt, Artificial Sequence
  Synthetic
uguuaaagagguugcagaa

SEQ ID NO: 9461 - RNA, 19 nt, Artificial Sequence
  Synthetic
uguauaggcuguuggugaa

SEQ ID NO: 9462 - RNA, 19 nt, Artificial Sequence
  Synthetic
aaugauguguucaguguaa

SEQ ID NO: 9463 - RNA, 19 nt, Artificial Sequence
  Synthetic
cauuguagauggagaauuc

SEQ ID NO: 9464 - RNA, 19 nt, Artificial Sequence
  Synthetic
gauggagaauucaacauaa

SEQ ID NO: 9465 - RNA, 19 nt, Artificial Sequence
  Synthetic
guacauguaaagugcauuu

SEQ ID NO: 9466 - RNA, 19 nt, Artificial Sequence
  Synthetic
uaaagagguugcagaacuu

SEQ ID NO: 9467 - RNA, 19 nt, Artificial Sequence
  Synthetic
ccacaagaacauuaaagga

SEQ ID NO: 9468 - RNA, 19 nt, Artificial Sequence
  Synthetic
gaguuuauugagagaacau

SEQ ID NO: 9469 - RNA, 19 nt, Artificial Sequence
  Synthetic
gguaaaggcagcaguaaug

SEQ ID NO: 9470 - RNA, 19 nt, Artificial Sequence
  Synthetic
aagcaacuauugaagagaa

SEQ ID NO: 9471 - RNA, 19 nt, Artificial Sequence
  Synthetic
gcacaagcgaugcuaauga

SEQ ID NO: 9472 - RNA, 19 nt, Artificial Sequence
  Synthetic
gaauaaaguggaugacuac

SEQ ID NO: 9473 - RNA, 19 nt, Artificial Sequence
  Synthetic
gguuucugugagagacaaa

SEQ ID NO: 9474 - RNA, 19 nt, Artificial Sequence
  Synthetic
aggaggacuuccggaauaa

SEQ ID NO: 9475 - RNA, 19 nt, Artificial Sequence
  Synthetic
cacaagaacauuaaaggau

SEQ ID NO: 9476 - RNA, 19 nt, Artificial Sequence
  Synthetic
ggaaggaggugaugaaaca

SEQ ID NO: 9477 - RNA, 19 nt, Artificial Sequence
  Synthetic
cagaagauguccucagaaa

SEQ ID NO: 9478 - RNA, 19 nt, Artificial Sequence
  Synthetic
ugaaagaacagaaggacua

SEQ ID NO: 9479 - RNA, 19 nt, Artificial Sequence
  Synthetic
caaaugaagcagaaugaaa

SEQ ID NO: 9480 - RNA, 19 nt, Artificial Sequence
  Synthetic
cagaaggacuauugggaga

SEQ ID NO: 9481 - RNA, 19 nt, Artificial Sequence
  Synthetic
gcugucaacucaagagaaa

SEQ ID NO: 9482 - RNA, 19 nt, Artificial Sequence
  Synthetic
ggacugaacaaauggaaau

SEQ ID NO: 9483 - RNA, 19 nt, Artificial Sequence
  Synthetic
ucgcauaacucuagcugua

SEQ ID NO: 9484 - RNA, 19 nt, Artificial Sequence
  Synthetic
ugaagaaacaacaggaauu

SEQ ID NO: 9485 - RNA, 19 nt, Artificial Sequence
  Synthetic
ccaaggaugaugaguauua

SEQ ID NO: 9486 - RNA, 19 nt, Artificial Sequence
  Synthetic
gaagacaacccgugaguau

SEQ ID NO: 9487 - RNA, 19 nt, Artificial Sequence
  Synthetic
gaguuaugcccuagacuaa

SEQ ID NO: 9488 - RNA, 19 nt, Artificial Sequence
  Synthetic
agaaagaaauggagaagcu

SEQ ID NO: 9489 - RNA, 19 nt, Artificial Sequence
  Synthetic
gaauauggguaaaucagaa

SEQ ID NO: 9490 - RNA, 19 nt, Artificial Sequence
  Synthetic
cugcagagacagaaagaga

SEQ ID NO: 9491 - RNA, 19 nt, Artificial Sequence
  Synthetic
gcccaaggaugaugaguau

SEQ ID NO: 9492 - RNA, 19 nt, Artificial Sequence
  Synthetic
gagucaagauccugccuaa

SEQ ID NO: 9493 - RNA, 19 nt, Artificial Sequence
  Synthetic
agagacagaaagagagauu

SEQ ID NO: 9494 - RNA, 19 nt, Artificial Sequence
  Synthetic
agaggaaggaccagaagaa

SEQ ID NO: 9495 - RNA, 19 nt, Artificial Sequence
  Synthetic
uggaagagauugagcagca

SEQ ID NO: 9496 - RNA, 19 nt, Artificial Sequence
  Synthetic
gguccgagguugagaauuc

SEQ ID NO: 9497 - RNA, 19 nt, Artificial Sequence
  Synthetic
aagagaaagaaauggagaa

SEQ ID NO: 9498 - RNA, 19 nt, Artificial Sequence
  Synthetic
ggguaaaucagaauaauga

SEQ ID NO: 9499 - RNA, 19 nt, Artificial Sequence
  Synthetic
gcagagacagaaagagaga

SEQ ID NO: 9500 - RNA, 19 nt, Artificial Sequence
  Synthetic
caacaaggagcuuugcaaa

SEQ ID NO: 9501 - RNA, 19 nt, Artificial Sequence
  Synthetic
cuaaugugguugggaguua

SEQ ID NO: 9502 - RNA, 19 nt, Artificial Sequence
  Synthetic
gaagaaacaacaggaauua

SEQ ID NO: 9503 - RNA, 19 nt, Artificial Sequence
  Synthetic
ccauugaccuaaacaacaa

SEQ ID NO: 9504 - RNA, 19 nt, Artificial Sequence
  Synthetic
gaaggaggcgcaagacaaa

SEQ ID NO: 9505 - RNA, 19 nt, Artificial Sequence
  Synthetic
agacugagugagaacgaaa

SEQ ID NO: 9506 - RNA, 19 nt, Artificial Sequence
  Synthetic
agucauaagucucgaguua

SEQ ID NO: 9507 - RNA, 19 nt, Artificial Sequence
  Synthetic
acaagaugauguugggaaa

SEQ ID NO: 9508 - RNA, 19 nt, Artificial Sequence
  Synthetic
agagaaaggucuugacuau

SEQ ID NO: 9509 - RNA, 19 nt, Artificial Sequence
  Synthetic
aggcaaagcccuuaauaaa

SEQ ID NO: 9510 - RNA, 19 nt, Artificial Sequence
  Synthetic
cagaaauaauggucacaaa

SEQ ID NO: 9511 - RNA, 19 nt, Artificial Sequence
  Synthetic
gaucauaacacaaagacua

SEQ ID NO: 9512 - RNA, 19 nt, Artificial Sequence
  Synthetic
ccagagaauuuaagcagaa

SEQ ID NO: 9513 - RNA, 19 nt, Artificial Sequence
  Synthetic
agacauaucaaguggauuu

SEQ ID NO: 9514 - RNA, 19 nt, Artificial Sequence
  Synthetic
ugaaauggauccuggagaa

SEQ ID NO: 9515 - RNA, 19 nt, Artificial Sequence
  Synthetic
ggaugagaauagagaacuu

SEQ ID NO: 9516 - RNA, 19 nt, Artificial Sequence
  Synthetic
gcaaagcccuuaauaaaua

SEQ ID NO: 9517 - RNA, 19 nt, Artificial Sequence
  Synthetic
ugaagauuuacgagagaaa

SEQ ID NO: 9518 - RNA, 19 nt, Artificial Sequence
  Synthetic
ccaauagguuugaaaugaa

SEQ ID NO: 9519 - RNA, 19 nt, Artificial Sequence
  Synthetic
guacguagcggaugagaau

SEQ ID NO: 9520 - RNA, 19 nt, Artificial Sequence
  Synthetic
aaauggaggucaagaugaa

SEQ ID NO: 9521 - RNA, 19 nt, Artificial Sequence
  Synthetic
ccucggagucggacaauaa

SEQ ID NO: 9522 - RNA, 19 nt, Artificial Sequence
  Synthetic
ggaagguugugguuguaaa

SEQ ID NO: 9523 - RNA, 19 nt, Artificial Sequence
  Synthetic
guacauaugcggucaaaga

SEQ ID NO: 9524 - RNA, 19 nt, Artificial Sequence
  Synthetic
ggaagauccacguuugaaa

SEQ ID NO: 9525 - RNA, 19 nt, Artificial Sequence
  Synthetic
cucaacagguauaguauua

SEQ ID NO: 9526 - RNA, 19 nt, Artificial Sequence
  Synthetic
cugagagaauuguaacaua

SEQ ID NO: 9527 - RNA, 19 nt, Artificial Sequence
  Synthetic
uggaauugaucucgccaaa

SEQ ID NO: 9528 - RNA, 19 nt, Artificial Sequence
  Synthetic
cuuuaaucgccuugacuua

SEQ ID NO: 9529 - RNA, 19 nt, Artificial Sequence
  Synthetic
ggaaaugaggauagcgcca

SEQ ID NO: 9530 - RNA, 19 nt, Artificial Sequence
  Synthetic
gacaauaacaucagacaga

SEQ ID NO: 9531 - RNA, 19 nt, Artificial Sequence
  Synthetic
gaaaggaaucacaccauua

SEQ ID NO: 9532 - RNA, 19 nt, Artificial Sequence
  Synthetic
gcgaagacuuggagcccga

SEQ ID NO: 9533 - RNA, 19 nt, Artificial Sequence
  Synthetic
gagaauuauguccgugaaa

SEQ ID NO: 9534 - RNA, 19 nt, Artificial Sequence
  Synthetic
cgaaaagcguauccgguua

SEQ ID NO: 9535 - RNA, 19 nt, Artificial Sequence
  Synthetic
gcuguuuacaauagagcaa

SEQ ID NO: 9536 - RNA, 19 nt, Artificial Sequence
  Synthetic
gaagagacuuugaggccaa

SEQ ID NO: 9537 - RNA, 19 nt, Artificial Sequence
  Synthetic
augaacaaccugauggaaa

SEQ ID NO: 9538 - RNA, 19 nt, Artificial Sequence
  Synthetic
acgacgaggaggaggagaa

SEQ ID NO: 9539 - RNA, 19 nt, Artificial Sequence
  Synthetic
ggacaggagaggagaucca

SEQ ID NO: 9540 - RNA, 19 nt, Artificial Sequence
  Synthetic
aggaauuccaccagaguuu

SEQ ID NO: 9541 - RNA, 19 nt, Artificial Sequence
  Synthetic
aauaaugagcagaggcuga

SEQ ID NO: 9542 - RNA, 19 nt, Artificial Sequence
  Synthetic
ggaaagcggcaguggggaa

SEQ ID NO: 9543 - RNA, 19 nt, Artificial Sequence
  Synthetic
agacaaagcuggaggacaa

SEQ ID NO: 9544 - RNA, 19 nt, Artificial Sequence
  Synthetic
ggaaauagacacagaggaa

SEQ ID NO: 9545 - RNA, 19 nt, Artificial Sequence
  Synthetic
gaaaagaccugcagagaaa

SEQ ID NO: 9546 - RNA, 19 nt, Artificial Sequence
  Synthetic
gcagauaacugaacgagaa

SEQ ID NO: 9547 - RNA, 19 nt, Artificial Sequence
  Synthetic
ggacagagagugugagcga

SEQ ID NO: 9548 - RNA, 19 nt, Artificial Sequence
  Synthetic
ucauggaaccggagauaaa

SEQ ID NO: 9549 - RNA, 19 nt, Artificial Sequence
  Synthetic
gggaggaagggcuggauua

SEQ ID NO: 9550 - RNA, 19 nt, Artificial Sequence
  Synthetic
gauaacugaacgagaauua

SEQ ID NO: 9551 - RNA, 19 nt, Artificial Sequence
  Synthetic
gacuaaaggauauggacaa

SEQ ID NO: 9552 - RNA, 19 nt, Artificial Sequence
  Synthetic
aaauagacacagaggaauu

SEQ ID NO: 9553 - RNA, 19 nt, Artificial Sequence
  Synthetic
ccucagaacucgccaggua

SEQ ID NO: 9554 - RNA, 19 nt, Artificial Sequence
  Synthetic
gggcaaauuguauggagaa

SEQ ID NO: 9555 - RNA, 19 nt, Artificial Sequence
  Synthetic
ccacagugcgggugaggua

SEQ ID NO: 9556 - RNA, 19 nt, Artificial Sequence
  Synthetic
cuaagugauuggagaaaca

SEQ ID NO: 9557 - RNA, 19 nt, Artificial Sequence
  Synthetic
uagaauaccuugaugaaga

SEQ ID NO: 9558 - RNA, 19 nt, Artificial Sequence
  Synthetic
gaaauagaccuaagugauu

SEQ ID NO: 9559 - RNA, 19 nt, Artificial Sequence
  Synthetic
gagaagaacaagaaggagu

SEQ ID NO: 9560 - RNA, 19 nt, Artificial Sequence
  Synthetic
ggagaaacaacacagaaua

SEQ ID NO: 9561 - RNA, 19 nt, Artificial Sequence
  Synthetic
ggaugaaagacaaugauau

SEQ ID NO: 9562 - RNA, 19 nt, Artificial Sequence
  Synthetic
gagaaacaacacagaauau

SEQ ID NO: 9563 - RNA, 19 nt, Artificial Sequence
  Synthetic
aggaguacaucgagaggau

SEQ ID NO: 9564 - RNA, 19 nt, Artificial Sequence
  Synthetic
caacaaugaacaacgacua

SEQ ID NO: 9565 - RNA, 19 nt, Artificial Sequence
  Synthetic
aagcauucauucaggacua

SEQ ID NO: 9566 - RNA, 19 nt, Artificial Sequence
  Synthetic
agaagaacaagaaggagua

SEQ ID NO: 9567 - RNA, 19 nt, Artificial Sequence
  Synthetic
gggagaagauccaauuuau

SEQ ID NO: 9568 - RNA, 19 nt, Artificial Sequence
  Synthetic
gggcugcaguggaaagauu

SEQ ID NO: 9569 - RNA, 19 nt, Artificial Sequence
  Synthetic
gaucaaaugcucagcuaca

SEQ ID NO: 9570 - RNA, 19 nt, Artificial Sequence
  Synthetic
gauccuuggucuugcacua

SEQ ID NO: 9571 - RNA, 19 nt, Artificial Sequence
  Synthetic
gcacaauacuuggagucaa

SEQ ID NO: 9572 - RNA, 19 nt, Artificial Sequence
  Synthetic
uggaaagauucaacaauga

SEQ ID NO: 9573 - RNA, 19 nt, Artificial Sequence
  Synthetic
ucgcugugauugugaauaa

SEQ ID NO: 9574 - RNA, 19 nt, Artificial Sequence
  Synthetic
gggccuaggcugauaguca

SEQ ID NO: 9575 - RNA, 19 nt, Artificial Sequence
  Synthetic
gguaacaacuucuccagua

SEQ ID NO: 9576 - RNA, 19 nt, Artificial Sequence
  Synthetic
ggccggaugccauggguaa

SEQ ID NO: 9577 - RNA, 19 nt, Artificial Sequence
  Synthetic
gggcaggcuuucuguguga

SEQ ID NO: 9578 - RNA, 19 nt, Artificial Sequence
  Synthetic
guaacaacuucuccaguau

SEQ ID NO: 9579 - RNA, 19 nt, Artificial Sequence
  Synthetic
gguuaucaugguuggcuua

SEQ ID NO: 9580 - RNA, 19 nt, Artificial Sequence
  Synthetic
aggcagucauaaugcagua

SEQ ID NO: 9581 - RNA, 19 nt, Artificial Sequence
  Synthetic
gcagagggcuccagguucu

SEQ ID NO: 9582 - RNA, 19 nt, Artificial Sequence
  Synthetic
gcaaacagugucuauuuua

SEQ ID NO: 9583 - RNA, 19 nt, Artificial Sequence
  Synthetic
ucgcauucuggguggacaa

SEQ ID NO: 9584 - RNA, 19 nt, Artificial Sequence
  Synthetic
ggagagaggggcaggcuuu

SEQ ID NO: 9585 - RNA, 19 nt, Artificial Sequence
  Synthetic
ccaucaagggcaucaucaa

SEQ ID NO: 9586 - RNA, 19 nt, Artificial Sequence
  Synthetic
ccauaaggacgucaaacuu

SEQ ID NO: 9587 - RNA, 19 nt, Artificial Sequence
  Synthetic
cugaggaguuugccaauga

SEQ ID NO: 9588 - RNA, 19 nt, Artificial Sequence
  Synthetic
cccuagaaaugcugccuuu

SEQ ID NO: 9589 - RNA, 19 nt, Artificial Sequence
  Synthetic
ggcugaagaucaccaagaa

SEQ ID NO: 9590 - RNA, 19 nt, Artificial Sequence
  Synthetic
ugguggaccgcaaggaauu

SEQ ID NO: 9591 - RNA, 19 nt, Artificial Sequence
  Synthetic
uuacagagaggcaaaccaa

SEQ ID NO: 9592 - RNA, 19 nt, Artificial Sequence
  Synthetic
aaagugauuucguaccaaa

SEQ ID NO: 9593 - RNA, 19 nt, Artificial Sequence
  Synthetic
gcuaugaacacgcggugga

SEQ ID NO: 9594 - RNA, 19 nt, Artificial Sequence
  Synthetic
gcaggcagggcauggguuu

SEQ ID NO: 9595 - RNA, 19 nt, Artificial Sequence
  Synthetic
aagaacagguuugcagcua

SEQ ID NO: 9596 - RNA, 19 nt, Artificial Sequence
  Synthetic
ccgcagaacucacucaacu

SEQ ID NO: 9597 - RNA, 19 nt, Artificial Sequence
  Synthetic
ggaagucacugucccacua

SEQ ID NO: 9598 - RNA, 19 nt, Artificial Sequence
  Synthetic
uggcaaacagugucuauuu

SEQ ID NO: 9599 - RNA, 19 nt, Artificial Sequence
  Synthetic
uguacagccugcucaacaa

SEQ ID NO: 9600 - RNA, 19 nt, Artificial Sequence
  Synthetic
gcacuugggucgcugugau

SEQ ID NO: 9601 - RNA, 19 nt, Artificial Sequence
  Synthetic
ggaggugucuguaguccau

SEQ ID NO: 9602 - RNA, 19 nt, Artificial Sequence
  Synthetic
ggcaaacagugucuauuuu

SEQ ID NO: 9603 - RNA, 19 nt, Artificial Sequence
  Synthetic
ccacaaagagcgugcgccu

SEQ ID NO: 9604 - RNA, 19 nt, Artificial Sequence
  Synthetic
ucaucaacggcgaggacau

SEQ ID NO: 9605 - RNA, 19 nt, Artificial Sequence
  Synthetic
guucaaagcuugggagaaa

SEQ ID NO: 9606 - RNA, 19 nt, Artificial Sequence
  Synthetic
gugaauugguccucagaua

SEQ ID NO: 9607 - RNA, 19 nt, Artificial Sequence
  Synthetic
cguuugaaauucugaguuu

SEQ ID NO: 9608 - RNA, 19 nt, Artificial Sequence
  Synthetic
ggagaaacacuaaagaaga

SEQ ID NO: 9609 - RNA, 19 nt, Artificial Sequence
  Synthetic
gggcagcacgggacagaaa

SEQ ID NO: 9610 - RNA, 19 nt, Artificial Sequence
  Synthetic
gcggagaaacacuaaagaa

SEQ ID NO: 9611 - RNA, 19 nt, Artificial Sequence
  Synthetic
caagauagguuucuguauu

SEQ ID NO: 9612 - RNA, 19 nt, Artificial Sequence
  Synthetic
guucagaggauuuaacaau

SEQ ID NO: 9613 - RNA, 19 nt, Artificial Sequence
  Synthetic
gaaacgucacggaggagua

SEQ ID NO: 9614 - RNA, 19 nt, Artificial Sequence
  Synthetic
gcacugacuuccagaucau

SEQ ID NO: 9615 - RNA, 19 nt, Artificial Sequence
  Synthetic
ucacaaguguccugcaaaa

SEQ ID NO: 9616 - RNA, 19 nt, Artificial Sequence
  Synthetic
aagaaugaaucaacugcua

SEQ ID NO: 9617 - RNA, 19 nt, Artificial Sequence
  Synthetic
ccuaauaucuugacuucau

SEQ ID NO: 9618 - RNA, 19 nt, Artificial Sequence
  Synthetic
gagaaacacuaaagaagac

SEQ ID NO: 9619 - RNA, 19 nt, Artificial Sequence
  Synthetic
gaugagagcaaguuugaga

SEQ ID NO: 9620 - RNA, 19 nt, Artificial Sequence
  Synthetic
gcagagccagcgaaggaaa

SEQ ID NO: 9621 - RNA, 19 nt, Artificial Sequence
  Synthetic
gggagagggcugagauuug

SEQ ID NO: 9622 - RNA, 19 nt, Artificial Sequence
  Synthetic
caacaggccagugggcaaa

SEQ ID NO: 9623 - RNA, 19 nt, Artificial Sequence
  Synthetic
gcaaauaaggccaaaaugu

SEQ ID NO: 9624 - RNA, 19 nt, Artificial Sequence
  Synthetic
gcaagauagguuucuguau

SEQ ID NO: 9625 - RNA, 19 nt, Artificial Sequence
  Synthetic
caucagcccaugcaagaua

SEQ ID NO: 9626 - RNA, 19 nt, Artificial Sequence
  Synthetic
cuuaggcccucguggauuu

SEQ ID NO: 9627 - RNA, 19 nt, Artificial Sequence
  Synthetic
ggucaguucagaggauuua

SEQ ID NO: 9628 - RNA, 19 nt, Artificial Sequence
  Synthetic
uguaaaggcuggugaaaga

SEQ ID NO: 9629 - RNA, 19 nt, Artificial Sequence
  Synthetic
aagcauaaauccaaagaga

SEQ ID NO: 9630 - RNA, 19 nt, Artificial Sequence
  Synthetic
gcauaaauccaaagagaac

SEQ ID NO: 9631 - RNA, 19 nt, Artificial Sequence
  Synthetic
caacagauaugauggcauu

SEQ ID NO: 9632 - RNA, 19 nt, Artificial Sequence
  Synthetic
gugaaauacuggccagaga

SEQ ID NO: 9633 - RNA, 19 nt, Artificial Sequence
  Synthetic
gugaugugguaaugguuaa

SEQ ID NO: 9634 - RNA, 19 nt, Artificial Sequence
  Synthetic
caaauaaauuggacagugu

SEQ ID NO: 9635 - RNA, 19 nt, Artificial Sequence
  Synthetic
ggugaaagacucaagauga

SEQ ID NO: 9636 - RNA, 19 nt, Artificial Sequence
  Synthetic
aaaagaacuucgugugaaa

SEQ ID NO: 9637 - RNA, 19 nt, Artificial Sequence
  Synthetic
aagaagagaugauguugaa

SEQ ID NO: 9638 - RNA, 19 nt, Artificial Sequence
  Synthetic
cagaagaggaauacuggua

SEQ ID NO: 9639 - RNA, 19 nt, Artificial Sequence
  Synthetic
gcuaaacccuguucuaaua

SEQ ID NO: 9640 - RNA, 19 nt, Artificial Sequence
  Synthetic
guaaaaggacuaauggaaa

SEQ ID NO: 9641 - RNA, 19 nt, Artificial Sequence
  Synthetic
gaucuuagaccacgagcua

SEQ ID NO: 9642 - RNA, 19 nt, Artificial Sequence
  Synthetic
agacaaagccacugugcua

SEQ ID NO: 9643 - RNA, 19 nt, Artificial Sequence
  Synthetic
ggauaacaacuuugaggua

SEQ ID NO: 9644 - RNA, 19 nt, Artificial Sequence
  Synthetic
cagaagagcucagcaaaua

SEQ ID NO: 9645 - RNA, 19 nt, Artificial Sequence
  Synthetic
gcacggauguccagaucua

SEQ ID NO: 9646 - RNA, 19 nt, Artificial Sequence
  Synthetic
ucagaagcuucaagacaaa

SEQ ID NO: 9647 - RNA, 19 nt, Artificial Sequence
  Synthetic
gggaaugaccccagagauu

SEQ ID NO: 9648 - RNA, 19 nt, Artificial Sequence
  Synthetic
ugggugagcuggugggaau

SEQ ID NO: 9649 - RNA, 19 nt, Artificial Sequence
  Synthetic
caguagagggguagaauua

SEQ ID NO: 9650 - RNA, 19 nt, Artificial Sequence
  Synthetic
agaaguacauugcggagaa

SEQ ID NO: 9651 - RNA, 19 nt, Artificial Sequence
  Synthetic
ccagaagagcucagcaaau

SEQ ID NO: 9652 - RNA, 19 nt, Artificial Sequence
  Synthetic
agacuuugcagcuggauaa

SEQ ID NO: 9653 - RNA, 19 nt, Artificial Sequence
  Synthetic
gauaacaacuuugagguaa

SEQ ID NO: 9654 - RNA, 19 nt, Artificial Sequence
  Synthetic
ccaugagagugcugugaca

SEQ ID NO: 9655 - RNA, 19 nt, Artificial Sequence
  Synthetic
cgggugagccaauggauuu

SEQ ID NO: 9656 - RNA, 19 nt, Artificial Sequence
  Synthetic
ggacagaagccucaaguuc

SEQ ID NO: 9657 - RNA, 19 nt, Artificial Sequence
  Synthetic
cuuugcagcuggauaacaa

SEQ ID NO: 9658 - RNA, 19 nt, Artificial Sequence
  Synthetic
guacuaauguggccaacuu

SEQ ID NO: 9659 - RNA, 19 nt, Artificial Sequence
  Synthetic
aagcagugaucuaguuuca

SEQ ID NO: 9660 - RNA, 19 nt, Artificial Sequence
  Synthetic
ugaaagcuuugcaggauga

SEQ ID NO: 9661 - RNA, 19 nt, Artificial Sequence
  Synthetic
uucagaagcuucaagacaa

SEQ ID NO: 9662 - RNA, 19 nt, Artificial Sequence
  Synthetic
ggacggagauucuucacuu

SEQ ID NO: 9663 - RNA, 19 nt, Artificial Sequence
  Synthetic
gcaaacaauggacggagau

SEQ ID NO: 9664 - RNA, 19 nt, Artificial Sequence
  Synthetic
gggaagacacucaggcuaa

SEQ ID NO: 9665 - RNA, 19 nt, Artificial Sequence
  Synthetic
gaguggaccuggagaagaa

SEQ ID NO: 9666 - RNA, 19 nt, Artificial Sequence
  Synthetic
agagacaacugcagagcua

SEQ ID NO: 9667 - RNA, 19 nt, Artificial Sequence
  Synthetic
gacaagacaagcagggaua

SEQ ID NO: 9668 - RNA, 19 nt, Artificial Sequence
  Synthetic
ugguggaguuacagacaaa

SEQ ID NO: 9669 - RNA, 19 nt, Artificial Sequence
  Synthetic
uggaagaauaugugaauca

SEQ ID NO: 9670 - RNA, 19 nt, Artificial Sequence
  Synthetic
ggaaccagcuggaagauga

SEQ ID NO: 9671 - RNA, 19 nt, Artificial Sequence
  Synthetic
ggagaagaacgcugaccaa

SEQ ID NO: 9672 - RNA, 19 nt, Artificial Sequence
  Synthetic
gcaagaagcagcagcuaga

SEQ ID NO: 9673 - RNA, 19 nt, Artificial Sequence
  Synthetic
gggaaauggaugcuaaaga

SEQ ID NO: 9674 - RNA, 19 nt, Artificial Sequence
  Synthetic
agauagaccucucagggaa

SEQ ID NO: 9675 - RNA, 19 nt, Artificial Sequence
  Synthetic
gcuccagaccugcaggaaa

SEQ ID NO: 9676 - RNA, 19 nt, Artificial Sequence
  Synthetic
ucucugagcugaagacauu

SEQ ID NO: 9677 - RNA, 19 nt, Artificial Sequence
  Synthetic
gagccaaaucccuggguca

SEQ ID NO: 9678 - RNA, 19 nt, Artificial Sequence
  Synthetic
ggacaagacaagcagggau

SEQ ID NO: 9679 - RNA, 19 nt, Artificial Sequence
  Synthetic
gagcagagcuuccggauuc

SEQ ID NO: 9680 - RNA, 19 nt, Artificial Sequence
  Synthetic
cuggagacagggaagguua

SEQ ID NO: 9681 - RNA, 19 nt, Artificial Sequence
  Synthetic
gaugaaggcugucggcuga

SEQ ID NO: 9682 - RNA, 19 nt, Artificial Sequence
  Synthetic
agagaguggaccuggagaa

SEQ ID NO: 9683 - RNA, 19 nt, Artificial Sequence
  Synthetic
ccugugaguuccugaguga

SEQ ID NO: 9684 - RNA, 19 nt, Artificial Sequence
  Synthetic
gagcuggacuugagccaca

SEQ ID NO: 9685 - RNA, 19 nt, Artificial Sequence
  Synthetic
ggaagagaauccagaagcu

SEQ ID NO: 9686 - RNA, 19 nt, Artificial Sequence
  Synthetic
aggaugaggcugacacauu

SEQ ID NO: 9687 - RNA, 19 nt, Artificial Sequence
  Synthetic
agaagugggcagagggcca

SEQ ID NO: 9688 - RNA, 19 nt, Artificial Sequence
  Synthetic
gauccaacgaggaggagga

SEQ ID NO: 9689 - RNA, 19 nt, Artificial Sequence
  Synthetic
gggguuagcaggaaguaaa

SEQ ID NO: 9690 - RNA, 19 nt, Artificial Sequence
  Synthetic
gcaaguggcuuuuggaaua

SEQ ID NO: 9691 - RNA, 19 nt, Artificial Sequence
  Synthetic
gcuuauagaugaagaagaa

SEQ ID NO: 9692 - RNA, 19 nt, Artificial Sequence
  Synthetic
cagcaagguuugaggaauu

SEQ ID NO: 9693 - RNA, 19 nt, Artificial Sequence
  Synthetic
agaagaagcaacagggaaa

SEQ ID NO: 9694 - RNA, 19 nt, Artificial Sequence
  Synthetic
gaacaauaugcaugagaaa

SEQ ID NO: 9695 - RNA, 19 nt, Artificial Sequence
  Synthetic
gcauaagguuccucagaaa

SEQ ID NO: 9696 - RNA, 19 nt, Artificial Sequence
  Synthetic
gccgagagcuguugagaaa

SEQ ID NO: 9697 - RNA, 19 nt, Artificial Sequence
  Synthetic
ccuuaaagaccgagcgcaa

SEQ ID NO: 9698 - RNA, 19 nt, Artificial Sequence
  Synthetic
ccuuaggagaagagggaaa

SEQ ID NO: 9699 - RNA, 19 nt, Artificial Sequence
  Synthetic
gagaagagggaaacagaaa

SEQ ID NO: 9700 - RNA, 19 nt, Artificial Sequence
  Synthetic
cagccaagaugcaguguaa

SEQ ID NO: 9701 - RNA, 19 nt, Artificial Sequence
  Synthetic
ccuagaaugucuugggaau

SEQ ID NO: 9702 - RNA, 19 nt, Artificial Sequence
  Synthetic
agugagaacucguuaauaa

SEQ ID NO: 9703 - RNA, 19 nt, Artificial Sequence
  Synthetic
gauauuugcuccuaagaaa

SEQ ID NO: 9704 - RNA, 19 nt, Artificial Sequence
  Synthetic
gaacagaaguaguaccaau

SEQ ID NO: 9705 - RNA, 19 nt, Artificial Sequence
  Synthetic
gccacaaacacuaggguaa

SEQ ID NO: 9706 - RNA, 19 nt, Artificial Sequence
  Synthetic
ggaucagaccugugaacua

SEQ ID NO: 9707 - RNA, 19 nt, Artificial Sequence
  Synthetic
gcuuaauggcuguuugaaa

SEQ ID NO: 9708 - RNA, 19 nt, Artificial Sequence
  Synthetic
agacaggccuacugacaaa

SEQ ID NO: 9709 - RNA, 19 nt, Artificial Sequence
  Synthetic
gcaggaagaccgaaagaau

SEQ ID NO: 9710 - RNA, 19 nt, Artificial Sequence
  Synthetic
gggcagaagauccuaguaa

SEQ ID NO: 9711 - RNA, 19 nt, Artificial Sequence
  Synthetic
uggaaagacuguuugcaaa

SEQ ID NO: 9712 - RNA, 19 nt, Artificial Sequence
  Synthetic
gaagaaaagaaguugguaa

SEQ ID NO: 9713 - RNA, 19 nt, Artificial Sequence
  Synthetic
caaggagacuguugaggaa

SEQ ID NO: 9714 - RNA, 19 nt, Artificial Sequence
  Synthetic
uguaaugaacagugagaau

SEQ ID NO: 9715 - RNA, 19 nt, Artificial Sequence
  Synthetic
ggaaagacuguuugcaaau

SEQ ID NO: 9716 - RNA, 19 nt, Artificial Sequence
  Synthetic
cgguuaaauguuugugaua

SEQ ID NO: 9717 - RNA, 19 nt, Artificial Sequence
  Synthetic
agagggaaacagaaagaaa

SEQ ID NO: 9718 - RNA, 19 nt, Artificial Sequence
  Synthetic
aggaaacaugcuagaauua

SEQ ID NO: 9719 - RNA, 19 nt, Artificial Sequence
  Synthetic
acucaaugguguaaaucaa

SEQ ID NO: 9720 - RNA, 19 nt, Artificial Sequence
  Synthetic
gcaagacagugaagagaaa

SEQ ID NO: 9721 - RNA, 19 nt, Artificial Sequence
  Synthetic
gaaaugaacugcagcuuua

SEQ ID NO: 9722 - RNA, 19 nt, Artificial Sequence
  Synthetic
cuggcaaagacaagaauaa

SEQ ID NO: 9723 - RNA, 19 nt, Artificial Sequence
  Synthetic
gagugaagaucaaagacuu

SEQ ID NO: 9724 - RNA, 19 nt, Artificial Sequence
  Synthetic
cuucauacuuucugcaaga

SEQ ID NO: 9725 - RNA, 19 nt, Artificial Sequence
  Synthetic
gcggcugaguucuggcaaa

SEQ ID NO: 9726 - RNA, 19 nt, Artificial Sequence
  Synthetic
cccagauauuuaugugaaa

SEQ ID NO: 9727 - RNA, 19 nt, Artificial Sequence
  Synthetic
caauacagugugaaagaga

SEQ ID NO: 9728 - RNA, 19 nt, Artificial Sequence
  Synthetic
cauuaagauccacgagaca

SEQ ID NO: 9729 - RNA, 19 nt, Artificial Sequence
  Synthetic
ugaaagagaagaggaggua

SEQ ID NO: 9730 - RNA, 19 nt, Artificial Sequence
  Synthetic
gugaaagagaagaggaggu

SEQ ID NO: 9731 - RNA, 19 nt, Artificial Sequence
  Synthetic
ggcaaagacaagaauaaaa

SEQ ID NO: 9732 - RNA, 19 nt, Artificial Sequence
  Synthetic
agacacagccacugcucaa

SEQ ID NO: 9733 - RNA, 19 nt, Artificial Sequence
  Synthetic
agagaaacggauucgggaa

SEQ ID NO: 9734 - RNA, 19 nt, Artificial Sequence
  Synthetic
uggcaaagacaagaauaaa

SEQ ID NO: 9735 - RNA, 19 nt, Artificial Sequence
  Synthetic
agaguuguauugugaagua

SEQ ID NO: 9736 - RNA, 19 nt, Artificial Sequence
  Synthetic
ugcaggacaucguguauaa

SEQ ID NO: 9737 - RNA, 19 nt, Artificial Sequence
  Synthetic
acacauuguuugcugccua

SEQ ID NO: 9738 - RNA, 19 nt, Artificial Sequence
  Synthetic
cagugaagagaaacggauu

SEQ ID NO: 9739 - RNA, 19 nt, Artificial Sequence
  Synthetic
ggaggagguucgagugaag

SEQ ID NO: 9740 - RNA, 19 nt, Artificial Sequence
  Synthetic
gugaaguaccuccaaacua

SEQ ID NO: 9741 - RNA, 19 nt, Artificial Sequence
  Synthetic
acucuaaagcccacuacua

SEQ ID NO: 9742 - RNA, 19 nt, Artificial Sequence
  Synthetic
gaggaggagguucgaguga

SEQ ID NO: 9743 - RNA, 19 nt, Artificial Sequence
  Synthetic
gcuaugaugagcaguugaa

SEQ ID NO: 9744 - RNA, 19 nt, Artificial Sequence
  Synthetic
aaagcguccugcagaacaa

SEQ ID NO: 9745 - RNA, 19 nt, Artificial Sequence
  Synthetic
aauacagugugaaagagaa

SEQ ID NO: 9746 - RNA, 19 nt, Artificial Sequence
  Synthetic
gugccuggcuugcaagaca

SEQ ID NO: 9747 - RNA, 19 nt, Artificial Sequence
  Synthetic
uacaauacagugugaaaga

SEQ ID NO: 9748 - RNA, 19 nt, Artificial Sequence
  Synthetic
ugcaagaguuguauuguga

SEQ ID NO: 9749 - RNA, 19 nt, Artificial Sequence
  Synthetic
agguucgagugaagaucaa

SEQ ID NO: 9750 - RNA, 19 nt, Artificial Sequence
  Synthetic
ccacacaucuuuagaacua

SEQ ID NO: 9751 - RNA, 19 nt, Artificial Sequence
  Synthetic
aaagaaauccagagaggaa

SEQ ID NO: 9752 - RNA, 19 nt, Artificial Sequence
  Synthetic
caugauagccucuuagaua

SEQ ID NO: 9753 - RNA, 19 nt, Artificial Sequence
  Synthetic
ucaagcagcaauagagaaa

SEQ ID NO: 9754 - RNA, 19 nt, Artificial Sequence
  Synthetic
gaaggaagagauugagcua

SEQ ID NO: 9755 - RNA, 19 nt, Artificial Sequence
  Synthetic
gcucaaagugcuaaauuuu

SEQ ID NO: 9756 - RNA, 19 nt, Artificial Sequence
  Synthetic
uggaaucaguaaagaaaga

SEQ ID NO: 9757 - RNA, 19 nt, Artificial Sequence
  Synthetic
aagcaggacuucuuaauua

SEQ ID NO: 9758 - RNA, 19 nt, Artificial Sequence
  Synthetic
gagacuuacuucagaauca

SEQ ID NO: 9759 - RNA, 19 nt, Artificial Sequence
  Synthetic
gaucuuaugucaaguucua

SEQ ID NO: 9760 - RNA, 19 nt, Artificial Sequence
  Synthetic
gagaauuguuugcuguauu

SEQ ID NO: 9761 - RNA, 19 nt, Artificial Sequence
  Synthetic
gaaucagacuaugaagaaa

SEQ ID NO: 9762 - RNA, 19 nt, Artificial Sequence
  Synthetic
agccaagagucaugucaaa

SEQ ID NO: 9763 - RNA, 19 nt, Artificial Sequence
  Synthetic
uguggaaucaguaaagaaa

SEQ ID NO: 9764 - RNA, 19 nt, Artificial Sequence
  Synthetic
ccuaguaugcucaguaaau

SEQ ID NO: 9765 - RNA, 19 nt, Artificial Sequence
  Synthetic
caguaaauguuuguggaau

SEQ ID NO: 9766 - RNA, 19 nt, Artificial Sequence
  Synthetic
agaaucagacuaugaagaa

SEQ ID NO: 9767 - RNA, 19 nt, Artificial Sequence
  Synthetic
gcagauaggcauagugaaa

SEQ ID NO: 9768 - RNA, 19 nt, Artificial Sequence
  Synthetic
ucuagaaggucuugaaaua

SEQ ID NO: 9769 - RNA, 19 nt, Artificial Sequence
  Synthetic
aaggaaagauugugguaua

SEQ ID NO: 9770 - RNA, 19 nt, Artificial Sequence
  Synthetic
gggaaaggauggacaacaa

SEQ ID NO: 9771 - RNA, 19 nt, Artificial Sequence
  Synthetic
guucaagaguucaaagaaa

SEQ ID NO: 9772 - RNA, 19 nt, Artificial Sequence
  Synthetic
ccuaaucagucgacagaua

SEQ ID NO: 9773 - RNA, 19 nt, Artificial Sequence
  Synthetic
ccaacaaccuacagaagaa

SEQ ID NO: 9774 - RNA, 19 nt, Artificial Sequence
  Synthetic
gaaacaggcccuaaggaaa

SEQ ID NO: 9775 - RNA, 19 nt, Artificial Sequence
  Synthetic
cagaagaggaggaggaaga

SEQ ID NO: 9776 - RNA, 19 nt, Artificial Sequence
  Synthetic
gagagaagcuagugaagau

SEQ ID NO: 9777 - RNA, 19 nt, Artificial Sequence
  Synthetic
gggcaaaguggguguggaa

SEQ ID NO: 9778 - RNA, 19 nt, Artificial Sequence
  Synthetic
agaaugagagagugggaua

SEQ ID NO: 9779 - RNA, 19 nt, Artificial Sequence
  Synthetic
ggaaaagagacuagaggaa

SEQ ID NO: 9780 - RNA, 19 nt, Artificial Sequence
  Synthetic
aggaagacgaugaggauga

SEQ ID NO: 9781 - RNA, 19 nt, Artificial Sequence
  Synthetic
aggaagaugaggaggaaaa

SEQ ID NO: 9782 - RNA, 19 nt, Artificial Sequence
  Synthetic
gcucagaugaccagagaga

SEQ ID NO: 9783 - RNA, 19 nt, Artificial Sequence
  Synthetic
uggaagugaaggaggacaa

SEQ ID NO: 9784 - RNA, 19 nt, Artificial Sequence
  Synthetic
ggaagaggaggaagaggaa

SEQ ID NO: 9785 - RNA, 19 nt, Artificial Sequence
  Synthetic
aggaggaagaggaggaaga

SEQ ID NO: 9786 - RNA, 19 nt, Artificial Sequence
  Synthetic
aagaggaagcugagaaaga

SEQ ID NO: 9787 - RNA, 19 nt, Artificial Sequence
  Synthetic
gggugauccucuuggagaa

SEQ ID NO: 9788 - RNA, 19 nt, Artificial Sequence
  Synthetic
acgcacagcucuauagcaa

SEQ ID NO: 9789 - RNA, 19 nt, Artificial Sequence
  Synthetic
gaggacaagugcugggaga

SEQ ID NO: 9790 - RNA, 19 nt, Artificial Sequence
  Synthetic
guuuaggcacucagggaua

SEQ ID NO: 9791 - RNA, 19 nt, Artificial Sequence
  Synthetic
aggaugaagaugaggccua

SEQ ID NO: 9792 - RNA, 19 nt, Artificial Sequence
  Synthetic
ggguguggaagaaggcaaa

SEQ ID NO: 9793 - RNA, 19 nt, Artificial Sequence
  Synthetic
ugggagagauggaggcuga

SEQ ID NO: 9794 - RNA, 19 nt, Artificial Sequence
  Synthetic
aggaagccacugaggauaa

SEQ ID NO: 9795 - RNA, 19 nt, Artificial Sequence
  Synthetic
ccguaguggcuauggagaa

SEQ ID NO: 9796 - RNA, 19 nt, Artificial Sequence
  Synthetic
uggaaauggccgagagucu

SEQ ID NO: 9797 - RNA, 19 nt, Artificial Sequence
  Synthetic
ccucgaugcauaaggacua

SEQ ID NO: 9798 - RNA, 19 nt, Artificial Sequence
  Synthetic
gggaagaaaucaaguuaau

SEQ ID NO: 9799 - RNA, 19 nt, Artificial Sequence
  Synthetic
gugcagagaccguggagaa

SEQ ID NO: 9800 - RNA, 19 nt, Artificial Sequence
  Synthetic
caaagaaaccaucaagaaa

SEQ ID NO: 9801 - RNA, 19 nt, Artificial Sequence
  Synthetic
cagccaaauugcagaagaa

SEQ ID NO: 9802 - RNA, 19 nt, Artificial Sequence
  Synthetic
ccaaagaaaccaucaagaa

SEQ ID NO: 9803 - RNA, 19 nt, Artificial Sequence
  Synthetic
gagaaaaggucaagaaaug

SEQ ID NO: 9804 - RNA, 19 nt, Artificial Sequence
  Synthetic
acacuacgcagaagagaaa

SEQ ID NO: 9805 - RNA, 19 nt, Artificial Sequence
  Synthetic
cggaacaucacuugcauua

SEQ ID NO: 9806 - RNA, 19 nt, Artificial Sequence
  Synthetic
gaagcagccuccaaagaaa

SEQ ID NO: 9807 - RNA, 19 nt, Artificial Sequence
  Synthetic
ccaacuauguguaaaucaa

SEQ ID NO: 9808 - RNA, 19 nt, Artificial Sequence
  Synthetic
ucaaggaggugguugcuaa

SEQ ID NO: 9809 - RNA, 19 nt, Artificial Sequence
  Synthetic
acaaauagucggaacauca

SEQ ID NO: 9810 - RNA, 19 nt, Artificial Sequence
  Synthetic
aggaagaucgugaacauaa

SEQ ID NO: 9811 - RNA, 19 nt, Artificial Sequence
  Synthetic
ccaaauugcagaagaaacu

SEQ ID NO: 9812 - RNA, 19 nt, Artificial Sequence
  Synthetic
gcaacaaauagucggaaca

SEQ ID NO: 9813 - RNA, 19 nt, Artificial Sequence
  Synthetic
gggaaggagcugaggaaug

SEQ ID NO: 9814 - RNA, 19 nt, Artificial Sequence
  Synthetic
guaaagaagcguaccauga

SEQ ID NO: 9815 - RNA, 19 nt, Artificial Sequence
  Synthetic
ggaaggagcugaggaauga

SEQ ID NO: 9816 - RNA, 19 nt, Artificial Sequence
  Synthetic
ucaggaagaucgugaacau

SEQ ID NO: 9817 - RNA, 19 nt, Artificial Sequence
  Synthetic
aucaguagcuggagagaga

SEQ ID NO: 9818 - RNA, 19 nt, Artificial Sequence
  Synthetic
cagggaaggagcugaggaa

SEQ ID NO: 9819 - RNA, 19 nt, Artificial Sequence
  Synthetic
ggauuggauuucaguucaa

SEQ ID NO: 9820 - RNA, 19 nt, Artificial Sequence
  Synthetic
caacacugcaugcggcaaa

SEQ ID NO: 9821 - RNA, 19 nt, Artificial Sequence
  Synthetic
agagaaaguacaaccacua

SEQ ID NO: 9822 - RNA, 19 nt, Artificial Sequence
  Synthetic
ccacuuauacugugugaca

SEQ ID NO: 9823 - RNA, 19 nt, Artificial Sequence
  Synthetic
ugggagaagagcaguacaa

SEQ ID NO: 9824 - RNA, 19 nt, Artificial Sequence
  Synthetic
gggaauguaaagaagcgua

SEQ ID NO: 9825 - RNA, 19 nt, Artificial Sequence
  Synthetic
acauuuggcuccacuguaa

SEQ ID NO: 9826 - RNA, 19 nt, Artificial Sequence
  Synthetic
auucauggcuuuaacagua

SEQ ID NO: 9827 - RNA, 19 nt, Artificial Sequence
  Synthetic
auuugaagccucaggaaca

SEQ ID NO: 9828 - RNA, 19 nt, Artificial Sequence
  Synthetic
gguauguccuggagagaua

SEQ ID NO: 9829 - RNA, 19 nt, Artificial Sequence
  Synthetic
gcucaaaccuggcaaagaa

SEQ ID NO: 9830 - RNA, 19 nt, Artificial Sequence
  Synthetic
gggcaaagauuucaacuau

SEQ ID NO: 9831 - RNA, 19 nt, Artificial Sequence
  Synthetic
ccacauuggccguagacua

SEQ ID NO: 9832 - RNA, 19 nt, Artificial Sequence
  Synthetic
aagauaagcuuuucaggaa

SEQ ID NO: 9833 - RNA, 19 nt, Artificial Sequence
  Synthetic
gccaaagaauugagcugaa

SEQ ID NO: 9834 - RNA, 19 nt, Artificial Sequence
  Synthetic
acaccaagcuggagcacuu

SEQ ID NO: 9835 - RNA, 19 nt, Artificial Sequence
  Synthetic
gcaaggacaugaagaaguu

SEQ ID NO: 9836 - RNA, 19 nt, Artificial Sequence
  Synthetic
agaagaagaaggugaagau

SEQ ID NO: 9837 - RNA, 19 nt, Artificial Sequence
  Synthetic
cggaugagcacucgaagaa

SEQ ID NO: 9838 - RNA, 19 nt, Artificial Sequence
  Synthetic
gcaauaaggucacugauca

SEQ ID NO: 9839 - RNA, 19 nt, Artificial Sequence
  Synthetic
cgauugaccgccagcgaua

SEQ ID NO: 9840 - RNA, 19 nt, Artificial Sequence
  Synthetic
gggaguguccgaaguguaa

SEQ ID NO: 9841 - RNA, 19 nt, Artificial Sequence
  Synthetic
cagagggagucgaugcuua

SEQ ID NO: 9842 - RNA, 19 nt, Artificial Sequence
  Synthetic
gcaaagauuucaacuauga

SEQ ID NO: 9843 - RNA, 19 nt, Artificial Sequence
  Synthetic
ggcaagaccgggaagcaaa

SEQ ID NO: 9844 - RNA, 19 nt, Artificial Sequence
  Synthetic
ugaaagcucugguggagaa

SEQ ID NO: 9845 - RNA, 19 nt, Artificial Sequence
  Synthetic
ccaaagaagacuccaaaga

SEQ ID NO: 9846 - RNA, 19 nt, Artificial Sequence
  Synthetic
ggaacgaugccaaagaauu

SEQ ID NO: 9847 - RNA, 19 nt, Artificial Sequence
  Synthetic
ucaaggagcagaagaugaa

SEQ ID NO: 9848 - RNA, 19 nt, Artificial Sequence
  Synthetic
acaaagaggauguggauaa

SEQ ID NO: 9849 - RNA, 19 nt, Artificial Sequence
  Synthetic
ccuaaaugaauauggguua

SEQ ID NO: 9850 - RNA, 19 nt, Artificial Sequence
  Synthetic
gcuggaaacuggaaagcaa

SEQ ID NO: 9851 - RNA, 19 nt, Artificial Sequence
  Synthetic
uggcaaagauucaaaggaa

SEQ ID NO: 9852 - RNA, 19 nt, Artificial Sequence
  Synthetic
agaagaagauguugaauga

SEQ ID NO: 9853 - RNA, 19 nt, Artificial Sequence
  Synthetic
gcagaauacccuauaguua

SEQ ID NO: 9854 - RNA, 19 nt, Artificial Sequence
  Synthetic
gcacagagauccaaacuau

SEQ ID NO: 9855 - RNA, 19 nt, Artificial Sequence
  Synthetic
auaaagagaaagaggauga

SEQ ID NO: 9856 - RNA, 19 nt, Artificial Sequence
  Synthetic
ccauaaagagaaagaggau

SEQ ID NO: 9857 - RNA, 19 nt, Artificial Sequence
  Synthetic
cagaauacccuauaguuaa

SEQ ID NO: 9858 - RNA, 19 nt, Artificial Sequence
  Synthetic
ccaaaggaguaauaaauga

SEQ ID NO: 9859 - RNA, 19 nt, Artificial Sequence
  Synthetic
gaacuaauccauaaagaga

SEQ ID NO: 9860 - RNA, 19 nt, Artificial Sequence
  Synthetic
auacaaugcuugacuacaa

SEQ ID NO: 9861 - RNA, 19 nt, Artificial Sequence
  Synthetic
ccaccuagcaagaaggaga

SEQ ID NO: 9862 - RNA, 19 nt, Artificial Sequence
  Synthetic
agacaguguaugcaggaua

SEQ ID NO: 9863 - RNA, 19 nt, Artificial Sequence
  Synthetic
gguauuggaugaugguuuu

SEQ ID NO: 9864 - RNA, 19 nt, Artificial Sequence
  Synthetic
cguaaauaccguagacagu

SEQ ID NO: 9865 - RNA, 19 nt, Artificial Sequence
  Synthetic
ccaaaauagaagaagaaga

SEQ ID NO: 9866 - RNA, 19 nt, Artificial Sequence
  Synthetic
ugaaaucucaugaggaaau

SEQ ID NO: 9867 - RNA, 19 nt, Artificial Sequence
  Synthetic
gguacauguccuagagcau

SEQ ID NO: 9868 - RNA, 19 nt, Artificial Sequence
  Synthetic
gagucaagacagugauuca

SEQ ID NO: 9869 - RNA, 19 nt, Artificial Sequence
  Synthetic
acaguuugcugaagaauuu

SEQ ID NO: 9870 - RNA, 19 nt, Artificial Sequence
  Synthetic
aagagaaagaggaugaaaa

SEQ ID NO: 9871 - RNA, 19 nt, Artificial Sequence
  Synthetic
ggaggaagacuuugaagga

SEQ ID NO: 9872 - RNA, 19 nt, Artificial Sequence
  Synthetic
aagaggauguggauaauau

SEQ ID NO: 9873 - RNA, 19 nt, Artificial Sequence
  Synthetic
gaacgagucagcagaaaga

SEQ ID NO: 9874 - RNA, 19 nt, Artificial Sequence
  Synthetic
gaacugaagaucaccacaa

SEQ ID NO: 9875 - RNA, 19 nt, Artificial Sequence
  Synthetic
gauauggguuuguguauga

SEQ ID NO: 9876 - RNA, 19 nt, Artificial Sequence
  Synthetic
cuauauugcuuuagugaac

SEQ ID NO: 9877 - RNA, 19 nt, Artificial Sequence
  Synthetic
agaagauguugaaugaaga

SEQ ID NO: 9878 - RNA, 19 nt, Artificial Sequence
  Synthetic
aagcagagauugagaauga

SEQ ID NO: 9879 - RNA, 19 nt, Artificial Sequence
  Synthetic
cgauauaguuuuacgaaga

SEQ ID NO: 9880 - RNA, 19 nt, Artificial Sequence
  Synthetic
ggaauaagauacagcaaca

SEQ ID NO: 9881 - RNA, 19 nt, Artificial Sequence
  Synthetic
ucauaaacuccuagacaaa

SEQ ID NO: 9882 - RNA, 19 nt, Artificial Sequence
  Synthetic
cauugaaccugguggcaua

SEQ ID NO: 9883 - RNA, 19 nt, Artificial Sequence
  Synthetic
guauauuacuguuguguga

SEQ ID NO: 9884 - RNA, 19 nt, Artificial Sequence
  Synthetic
ccaaguggcucuucauaaa

SEQ ID NO: 9885 - RNA, 19 nt, Artificial Sequence
  Synthetic
cuucauagcugccacgaua

SEQ ID NO: 9886 - RNA, 19 nt, Artificial Sequence
  Synthetic
gcacgagauggcagaauaa

SEQ ID NO: 9887 - RNA, 19 nt, Artificial Sequence
  Synthetic
gcgauuaaacgaaaugaua

SEQ ID NO: 9888 - RNA, 19 nt, Artificial Sequence
  Synthetic
ggacauacauucugcuaca

SEQ ID NO: 9889 - RNA, 19 nt, Artificial Sequence
  Synthetic
gaucuuacucaguguguua

SEQ ID NO: 9890 - RNA, 19 nt, Artificial Sequence
  Synthetic
guagggaaauuuugaagua

SEQ ID NO: 9891 - RNA, 19 nt, Artificial Sequence
  Synthetic
agaaugaaguggaugauga

SEQ ID NO: 9892 - RNA, 19 nt, Artificial Sequence
  Synthetic
ccacuaagauuguccguuu

SEQ ID NO: 9893 - RNA, 19 nt, Artificial Sequence
  Synthetic
gcacacaaccauucugaua

SEQ ID NO: 9894 - RNA, 19 nt, Artificial Sequence
  Synthetic
acgaaacaccuuugauuaa

SEQ ID NO: 9895 - RNA, 19 nt, Artificial Sequence
  Synthetic
gagcagaggaacaaaguca

SEQ ID NO: 9896 - RNA, 19 nt, Artificial Sequence
  Synthetic
ggagagagagugaauuuaa

SEQ ID NO: 9897 - RNA, 19 nt, Artificial Sequence
  Synthetic
gcagagauugagaaugaaa

SEQ ID NO: 9898 - RNA, 19 nt, Artificial Sequence
  Synthetic
acaaauauccugacugcua

SEQ ID NO: 9899 - RNA, 19 nt, Artificial Sequence
  Synthetic
ccucugaacacauaaauaa

SEQ ID NO: 9900 - RNA, 19 nt, Artificial Sequence
  Synthetic
ggugauguguugcuaaaua

SEQ ID NO: 9901 - RNA, 19 nt, Artificial Sequence
  Synthetic
gagaaguaauucagaagua

SEQ ID NO: 9902 - RNA, 19 nt, Artificial Sequence
  Synthetic
agauuuagucucaggauua

SEQ ID NO: 9903 - RNA, 19 nt, Artificial Sequence
  Synthetic
ccguaggcaucuuuaauaa

SEQ ID NO: 9904 - RNA, 19 nt, Artificial Sequence
  Synthetic
uaaacuaacuccagcaaaa

SEQ ID NO: 9905 - RNA, 19 nt, Artificial Sequence
  Synthetic
cgcagaaggacgaguacua

SEQ ID NO: 9906 - RNA, 19 nt, Artificial Sequence
  Synthetic
ccauacaguugagaaguaa

SEQ ID NO: 9907 - RNA, 19 nt, Artificial Sequence
  Synthetic
gcaaaauguggguacguua

SEQ ID NO: 9908 - RNA, 19 nt, Artificial Sequence
  Synthetic
guugagaaguaauucagaa

SEQ ID NO: 9909 - RNA, 19 nt, Artificial Sequence
  Synthetic
ggaaggagguugagcugcu

SEQ ID NO: 9910 - RNA, 19 nt, Artificial Sequence
  Synthetic
gggaggaguacgucagcau

SEQ ID NO: 9911 - RNA, 19 nt, Artificial Sequence
  Synthetic
accauacaguugagaagua

SEQ ID NO: 9912 - RNA, 19 nt, Artificial Sequence
  Synthetic
acgccaagauuuagucuca

SEQ ID NO: 9913 - RNA, 19 nt, Artificial Sequence
  Synthetic
gcgaggaaguggcuggagu

SEQ ID NO: 9914 - RNA, 19 nt, Artificial Sequence
  Synthetic
ggagagagccguuuccaga

SEQ ID NO: 9915 - RNA, 19 nt, Artificial Sequence
  Synthetic
cauguaagauacuaaccua

SEQ ID NO: 9916 - RNA, 19 nt, Artificial Sequence
  Synthetic
aagauuuagucucaggauu

SEQ ID NO: 9917 - RNA, 19 nt, Artificial Sequence
  Synthetic
ggaaguggcuggaguggag

SEQ ID NO: 9918 - RNA, 19 nt, Artificial Sequence
  Synthetic
ggacgggauuuuagguuuc

SEQ ID NO: 9919 - RNA, 19 nt, Artificial Sequence
  Synthetic
gcagagagaaaccaaccaa

SEQ ID NO: 9920 - RNA, 19 nt, Artificial Sequence
  Synthetic
guuagaacacucucaguuu

SEQ ID NO: 9921 - RNA, 19 nt, Artificial Sequence
  Synthetic
gauuuagucucaggauuaa

SEQ ID NO: 9922 - RNA, 19 nt, Artificial Sequence
  Synthetic
cggcgcagaaggacgagua

SEQ ID NO: 9923 - RNA, 19 nt, Artificial Sequence
  Synthetic
ugcccuaccugcuggacaa

SEQ ID NO: 9924 - RNA, 19 nt, Artificial Sequence
  Synthetic
gaagacacuuuauucguuu

SEQ ID NO: 9925 - RNA, 19 nt, Artificial Sequence
  Synthetic
gaggaguacgucagcauca

SEQ ID NO: 9926 - RNA, 19 nt, Artificial Sequence
  Synthetic
ggcugcagcuguacgguuu

SEQ ID NO: 9927 - RNA, 19 nt, Artificial Sequence
  Synthetic
gcuacauguugccugguuu

SEQ ID NO: 9928 - RNA, 19 nt, Artificial Sequence
  Synthetic
gcacagaaguuagaacacu

SEQ ID NO: 9929 - RNA, 19 nt, Artificial Sequence
  Synthetic
gccugaacccagaacauuu

SEQ ID NO: 9930 - RNA, 19 nt, Artificial Sequence
  Synthetic
ggcaauggacugaaugagu

SEQ ID NO: 9931 - RNA, 19 nt, Artificial Sequence
  Synthetic
ggauguaccuggagagaua

SEQ ID NO: 9932 - RNA, 19 nt, Artificial Sequence
  Synthetic
gagauuaagaagaggaaau

SEQ ID NO: 9933 - RNA, 19 nt, Artificial Sequence
  Synthetic
gggacagguucuaugaauu

SEQ ID NO: 9934 - RNA, 19 nt, Artificial Sequence
  Synthetic
ggacagguucuaugaauuu

SEQ ID NO: 9935 - RNA, 19 nt, Artificial Sequence
  Synthetic
gggagagagauuaagaaga

SEQ ID NO: 9936 - RNA, 19 nt, Artificial Sequence
  Synthetic
gcaaccgacagcagaguua

SEQ ID NO: 9937 - RNA, 19 nt, Artificial Sequence
  Synthetic
ggacugggaugcuggacau

SEQ ID NO: 9938 - RNA, 19 nt, Artificial Sequence
  Synthetic
gagagauuaagaagaggaa

SEQ ID NO: 9939 - RNA, 19 nt, Artificial Sequence
  Synthetic
ggagagagauuaagaagag

SEQ ID NO: 9940 - RNA, 19 nt, Artificial Sequence
  Synthetic
ggacugaugggcugcuaua

SEQ ID NO: 9941 - RNA, 19 nt, Artificial Sequence
  Synthetic
cauuucagggagagagauu

SEQ ID NO: 9942 - RNA, 19 nt, Artificial Sequence
  Synthetic
ugaggagggaggaugauaa

SEQ ID NO: 9943 - RNA, 19 nt, Artificial Sequence
  Synthetic
uuucagggagagagauuaa

SEQ ID NO: 9944 - RNA, 19 nt, Artificial Sequence
  Synthetic
ggaaauguuuguuuggucu

SEQ ID NO: 9945 - RNA, 19 nt, Artificial Sequence
  Synthetic
cagcagaguuacuguuacu

SEQ ID NO: 9946 - RNA, 19 nt, Artificial Sequence
  Synthetic
ccguuucauuucagggaga

SEQ ID NO: 9947 - RNA, 19 nt, Artificial Sequence
  Synthetic
gcacccagugucugagcaa

SEQ ID NO: 9948 - RNA, 19 nt, Artificial Sequence
  Synthetic
ccacaaggaccguuucauu

SEQ ID NO: 9949 - RNA, 19 nt, Artificial Sequence
  Synthetic
ggacucuguaugauugaaa

SEQ ID NO: 9950 - RNA, 19 nt, Artificial Sequence
  Synthetic
ugguccaguuugaggauga

SEQ ID NO: 9951 - RNA, 19 nt, Artificial Sequence
  Synthetic
ggaggaggcagaaggggaa

SEQ ID NO: 9952 - RNA, 19 nt, Artificial Sequence
  Synthetic
gguucuauggaaagacauu

SEQ ID NO: 9953 - RNA, 19 nt, Artificial Sequence
  Synthetic
aguguuugcuguaagaaga

SEQ ID NO: 9954 - RNA, 19 nt, Artificial Sequence
  Synthetic
cugagaauugggacaguuu

SEQ ID NO: 9955 - RNA, 19 nt, Artificial Sequence
  Synthetic
gagggcacauccuggguau

SEQ ID NO: 9956 - RNA, 19 nt, Artificial Sequence
  Synthetic
cuguaucaccucaguguuu

SEQ ID NO: 9957 - RNA, 19 nt, Artificial Sequence
  Synthetic
gaagaggaaauguuuguuu

SEQ ID NO: 9958 - RNA, 19 nt, Artificial Sequence
  Synthetic
gggaguggaaccugaaaau

SEQ ID NO: 9959 - RNA, 19 nt, Artificial Sequence
  Synthetic
gaauuugaaugcugugugu

SEQ ID NO: 9960 - RNA, 19 nt, Artificial Sequence
  Synthetic
gguccuugcucggagagua

SEQ ID NO: 9961 - RNA, 19 nt, Artificial Sequence
  Synthetic
gaauuugucugaaggguaa

SEQ ID NO: 9962 - RNA, 19 nt, Artificial Sequence
  Synthetic
uggucgaggugaugagaaa

SEQ ID NO: 9963 - RNA, 19 nt, Artificial Sequence
  Synthetic
cagcagaauuuaauagcaa

SEQ ID NO: 9964 - RNA, 19 nt, Artificial Sequence
  Synthetic
gcgcagugaugaagugauu

SEQ ID NO: 9965 - RNA, 19 nt, Artificial Sequence
  Synthetic
agaacaagucagugaauau

SEQ ID NO: 9966 - RNA, 19 nt, Artificial Sequence
  Synthetic
caguaaagugccugaguau

SEQ ID NO: 9967 - RNA, 19 nt, Artificial Sequence
  Synthetic
cgaagauggucgaggugau

SEQ ID NO: 9968 - RNA, 19 nt, Artificial Sequence
  Synthetic
ggaauuugucugaagggua

SEQ ID NO: 9969 - RNA, 19 nt, Artificial Sequence
  Synthetic
agccaaacaugcugaguau

SEQ ID NO: 9970 - RNA, 19 nt, Artificial Sequence
  Synthetic
acaacagaauacucagaaa

SEQ ID NO: 9971 - RNA, 19 nt, Artificial Sequence
  Synthetic
gguacaagccaaaggucau

SEQ ID NO: 9972 - RNA, 19 nt, Artificial Sequence
  Synthetic
aagaaaagauggucccaaa

SEQ ID NO: 9973 - RNA, 19 nt, Artificial Sequence
  Synthetic
augcauuauauguggacaa

SEQ ID NO: 9974 - RNA, 19 nt, Artificial Sequence
  Synthetic
gagcuuguuucuaugauua

SEQ ID NO: 9975 - RNA, 19 nt, Artificial Sequence
  Synthetic
caagggaaguacaaaguuu

SEQ ID NO: 9976 - RNA, 19 nt, Artificial Sequence
  Synthetic
agacagaaaucaaaagaca

SEQ ID NO: 9977 - RNA, 19 nt, Artificial Sequence
  Synthetic
aguccaacaagaaaggaaa

SEQ ID NO: 9978 - RNA, 19 nt, Artificial Sequence
  Synthetic
ccaaagaugucgaauauaa

SEQ ID NO: 9979 - RNA, 19 nt, Artificial Sequence
  Synthetic
ugauggaguucgaggaauu

SEQ ID NO: 9980 - RNA, 19 nt, Artificial Sequence
  Synthetic
cuuaagaaaugcaagggaa

SEQ ID NO: 9981 - RNA, 19 nt, Artificial Sequence
  Synthetic
ccgaaacaaugaaauguaa

SEQ ID NO: 9982 - RNA, 19 nt, Artificial Sequence
  Synthetic
ucauaagacaagugaaaga

SEQ ID NO: 9983 - RNA, 19 nt, Artificial Sequence
  Synthetic
gaaggaaguugaaaugcaa

SEQ ID NO: 9984 - RNA, 19 nt, Artificial Sequence
  Synthetic
ggaaggaaguugaaaugca

SEQ ID NO: 9985 - RNA, 19 nt, Artificial Sequence
  Synthetic
gaaagaagagcauggcaga

SEQ ID NO: 9986 - RNA, 19 nt, Artificial Sequence
  Synthetic
agaaagaaauccagagagg

SEQ ID NO: 9987 - RNA, 19 nt, Artificial Sequence
  Synthetic
agaggaaggaaguugaaau

SEQ ID NO: 9988 - RNA, 19 nt, Artificial Sequence
  Synthetic
caguaaagaaagaaaucca

SEQ ID NO: 9989 - RNA, 19 nt, Artificial Sequence
  Synthetic
uugcacaaucagagaauau

SEQ ID NO: 9990 - RNA, 19 nt, Artificial Sequence
  Synthetic
cuucaggacuuguggaaug

SEQ ID NO: 9991 - RNA, 19 nt, Artificial Sequence
  Synthetic
ggaggaaaccacagggaaa

SEQ ID NO: 9992 - RNA, 19 nt, Artificial Sequence
  Synthetic
acacagaggugaaagcuaa

SEQ ID NO: 9993 - RNA, 19 nt, Artificial Sequence
  Synthetic
gaaagaaacgagagcagaa

SEQ ID NO: 9994 - RNA, 19 nt, Artificial Sequence
  Synthetic
gugcugaaccagaagaaua

SEQ ID NO: 9995 - RNA, 19 nt, Artificial Sequence
  Synthetic
cagagaaggcugauauuaa

SEQ ID NO: 9996 - RNA, 19 nt, Artificial Sequence
  Synthetic
gggagaaaauggagaccaa

SEQ ID NO: 9997 - RNA, 19 nt, Artificial Sequence
  Synthetic
ggugaaagcuaauggccca

SEQ ID NO: 9998 - RNA, 19 nt, Artificial Sequence
  Synthetic
ucaauggacugguggacaa

SEQ ID NO: 9999 - RNA, 19 nt, Artificial Sequence
  Synthetic
gcagaaugaugucgacgaa

SEQ ID NO: 10000 - RNA, 19 nt, Artificial Sequence
  Synthetic
agaagaagcuugaagguuc

SEQ ID NO: 10001 - RNA, 19 nt, Artificial Sequence
  Synthetic
gcaaacagcugacaagaca

SEQ ID NO: 10002 - RNA, 19 nt, Artificial Sequence
  Synthetic
agaaugaugucgacgaaga

SEQ ID NO: 10003 - RNA, 19 nt, Artificial Sequence
  Synthetic
agaauaugacacugagcaa

SEQ ID NO: 10004 - RNA, 19 nt, Artificial Sequence
  Synthetic
cugcaguucuugugcggaa

SEQ ID NO: 10005 - RNA, 19 nt, Artificial Sequence
  Synthetic
ggagaagaaaggaggaaac

SEQ ID NO: 10006 - RNA, 19 nt, Artificial Sequence
  Synthetic
gcaaagaaagacuguccaa

SEQ ID NO: 10007 - RNA, 19 nt, Artificial Sequence
  Synthetic
cagugaacacagaggugaa

SEQ ID NO: 10008 - RNA, 19 nt, Artificial Sequence
  Synthetic
cuaccagguucuagcaaga

SEQ ID NO: 10009 - RNA, 19 nt, Artificial Sequence
  Synthetic
gaagacacagcaugaauua

SEQ ID NO: 10010 - RNA, 19 nt, Artificial Sequence
  Synthetic
cagaagaauaugacacuga

SEQ ID NO: 10011 - RNA, 19 nt, Artificial Sequence
  Synthetic
agacagagaaggcugauau

SEQ ID NO: 10012 - RNA, 19 nt, Artificial Sequence
  Synthetic
aaacugaacuaaaggccau

SEQ ID NO: 10013 - RNA, 19 nt, Artificial Sequence
  Synthetic
cugcaaggaagguggagau

SEQ ID NO: 10014 - RNA, 19 nt, Artificial Sequence
  Synthetic
gcaucauugugaagacaga

SEQ ID NO: 10015 - RNA, 19 nt, Artificial Sequence
  Synthetic
ggacagaucggccagcaaa

SEQ ID NO: 10016 - RNA, 19 nt, Artificial Sequence
  Synthetic
gggauuagcacccagaauu

SEQ ID NO: 10017 - RNA, 19 nt, Artificial Sequence
  Synthetic
aggagaagaaaggaggaaa

SEQ ID NO: 10018 - RNA, 19 nt, Artificial Sequence
  Synthetic
gaagguuccugaugcuaua

SEQ ID NO: 10019 - RNA, 19 nt, Artificial Sequence
  Synthetic
ggaccuccguugacagauu

SEQ ID NO: 10020 - RNA, 19 nt, Artificial Sequence
  Synthetic
ucuagcaagaggagaagaa

SEQ ID NO: 10021 - RNA, 19 nt, Artificial Sequence
  Synthetic
cugaagaagaagaagaaga

SEQ ID NO: 10022 - RNA, 19 nt, Artificial Sequence
  Synthetic
ugaucaggucaaagaaaua

SEQ ID NO: 10023 - RNA, 19 nt, Artificial Sequence
  Synthetic
cagugaugcgccugggaaa

SEQ ID NO: 10024 - RNA, 19 nt, Artificial Sequence
  Synthetic
agggaaagcaggugguguu

SEQ ID NO: 10025 - RNA, 19 nt, Artificial Sequence
  Synthetic
aagaggaagcgcagggaca

SEQ ID NO: 10026 - RNA, 19 nt, Artificial Sequence
  Synthetic
aagaagaagaagaagagga

SEQ ID NO: 10027 - RNA, 19 nt, Artificial Sequence
  Synthetic
ccugcuggacagaaagaaa

SEQ ID NO: 10028 - RNA, 19 nt, Artificial Sequence
  Synthetic
gcaccuuugucuuggccua

SEQ ID NO: 10029 - RNA, 19 nt, Artificial Sequence
  Synthetic
ucaccuguccugugcgaaa

SEQ ID NO: 10030 - RNA, 19 nt, Artificial Sequence
  Synthetic
aagcugaagaagaagaaga

SEQ ID NO: 10031 - RNA, 19 nt, Artificial Sequence
  Synthetic
agcugaagaagaagaagaa

SEQ ID NO: 10032 - RNA, 19 nt, Artificial Sequence
  Synthetic
agaaagaccuagaaagaaa

SEQ ID NO: 10033 - RNA, 19 nt, Artificial Sequence
  Synthetic
gcaagaagaagaagaguaa

SEQ ID NO: 10034 - RNA, 19 nt, Artificial Sequence
  Synthetic
ggagaaagaccuagaaaga

SEQ ID NO: 10035 - RNA, 19 nt, Artificial Sequence
  Synthetic
gggaagugauggagacaau

SEQ ID NO: 10036 - RNA, 19 nt, Artificial Sequence
  Synthetic
cugcagauuuugugaauua

SEQ ID NO: 10037 - RNA, 19 nt, Artificial Sequence
  Synthetic
acagaaaguggaagagaaa

SEQ ID NO: 10038 - RNA, 19 nt, Artificial Sequence
  Synthetic
cagauagguuagacagaaa

SEQ ID NO: 10039 - RNA, 19 nt, Artificial Sequence
  Synthetic
gauuaaggaaccagugaaa

SEQ ID NO: 10040 - RNA, 19 nt, Artificial Sequence
  Synthetic
agaaagagaaggaaagaga

SEQ ID NO: 10041 - RNA, 19 nt, Artificial Sequence
  Synthetic
aagugaaggacaaggaaua

SEQ ID NO: 10042 - RNA, 19 nt, Artificial Sequence
  Synthetic
aaggaaagagagaaggaaa

SEQ ID NO: 10043 - RNA, 19 nt, Artificial Sequence
  Synthetic
cgagaaugaugaaggcaau

SEQ ID NO: 10044 - RNA, 19 nt, Artificial Sequence
  Synthetic
gaguaaaguucuuagcaga

SEQ ID NO: 10045 - RNA, 19 nt, Artificial Sequence
  Synthetic
agaagaaaauggagaaaga

SEQ ID NO: 10046 - RNA, 19 nt, Artificial Sequence
  Synthetic
gaucaaggaggcagauuaa

SEQ ID NO: 10047 - RNA, 19 nt, Artificial Sequence
  Synthetic
gugaugaagacgagaauga

SEQ ID NO: 10048 - RNA, 19 nt, Artificial Sequence
  Synthetic
gacagaaaguggaagagaa

SEQ ID NO: 10049 - RNA, 19 nt, Artificial Sequence
  Synthetic
aggaaagagagaaggaaaa

SEQ ID NO: 10050 - RNA, 19 nt, Artificial Sequence
  Synthetic
cagacaacgaugaggucaa

SEQ ID NO: 10051 - RNA, 19 nt, Artificial Sequence
  Synthetic
agaccgacgagguggacaa

SEQ ID NO: 10052 - RNA, 19 nt, Artificial Sequence
  Synthetic
gcgacaggaaugggagaaa

SEQ ID NO: 10053 - RNA, 19 nt, Artificial Sequence
  Synthetic
gagcuuaaggagauggaga

SEQ ID NO: 10054 - RNA, 19 nt, Artificial Sequence
  Synthetic
acacugagacugauggcua

SEQ ID NO: 10055 - RNA, 19 nt, Artificial Sequence
  Synthetic
gaagagaagaggcgaaaau

SEQ ID NO: 10056 - RNA, 19 nt, Artificial Sequence
  Synthetic
gcugagaggcccaagguca

SEQ ID NO: 10057 - RNA, 19 nt, Artificial Sequence
  Synthetic
acucagauguagaggccga

SEQ ID NO: 10058 - RNA, 19 nt, Artificial Sequence
  Synthetic
aggucaaguucaagucauu

SEQ ID NO: 10059 - RNA, 19 nt, Artificial Sequence
  Synthetic
guuagaaaucugugcuaca

SEQ ID NO: 10060 - RNA, 19 nt, Artificial Sequence
  Synthetic
ucaucaacucggagcuuaa

SEQ ID NO: 10061 - RNA, 19 nt, Artificial Sequence
  Synthetic
cagcagagaacauggccau

SEQ ID NO: 10062 - RNA, 19 nt, Artificial Sequence
  Synthetic
accuagagaggguuagaaa

SEQ ID NO: 10063 - RNA, 19 nt, Artificial Sequence
  Synthetic
uggacgagauugaugccua

SEQ ID NO: 10064 - RNA, 19 nt, Artificial Sequence
  Synthetic
cagaggaggugguccgcau

SEQ ID NO: 10065 - RNA, 19 nt, Artificial Sequence
  Synthetic
ggguuagaaaucugugcua

SEQ ID NO: 10066 - RNA, 19 nt, Artificial Sequence
  Synthetic
ggugacaaggcgcgagaga

SEQ ID NO: 10067 - RNA, 19 nt, Artificial Sequence
  Synthetic
agaaacagcuccacagaaa

SEQ ID NO: 10068 - RNA, 19 nt, Artificial Sequence
  Synthetic
ggcagaaagugaugggaau

SEQ ID NO: 10069 - RNA, 19 nt, Artificial Sequence
  Synthetic
gaugagaaucuuauggaaa

SEQ ID NO: 10070 - RNA, 19 nt, Artificial Sequence
  Synthetic
agaaauggguugugggcca

SEQ ID NO: 10071 - RNA, 19 nt, Artificial Sequence
  Synthetic
agaaauugaugcagggcuu

SEQ ID NO: 10072 - RNA, 19 nt, Artificial Sequence
  Synthetic
ccacuagagagcaagaaua

SEQ ID NO: 10073 - RNA, 19 nt, Artificial Sequence
  Synthetic
ccagaagaccacagaaaca

SEQ ID NO: 10074 - RNA, 19 nt, Artificial Sequence
  Synthetic
gcagaaagugaugggaaua

SEQ ID NO: 10075 - RNA, 19 nt, Artificial Sequence
  Synthetic
agacagugaagaagggaau

SEQ ID NO: 10076 - RNA, 19 nt, Artificial Sequence
  Synthetic
agaggaagggcuaggcaua

SEQ ID NO: 10077 - RNA, 19 nt, Artificial Sequence
  Synthetic
uggaaggaagaaugggaaa

SEQ ID NO: 10078 - RNA, 19 nt, Artificial Sequence
  Synthetic
agugaugggaauaaagaaa

SEQ ID NO: 10079 - RNA, 19 nt, Artificial Sequence
  Synthetic
caaaggaggaugaagaaaa

SEQ ID NO: 10080 - RNA, 19 nt, Artificial Sequence
  Synthetic
cacuagagagcaagaauaa

SEQ ID NO: 10081 - RNA, 19 nt, Artificial Sequence
  Synthetic
ccaauaggugggugaagaa

SEQ ID NO: 10082 - RNA, 19 nt, Artificial Sequence
  Synthetic
ucacuagaaaugagaacaa

SEQ ID NO: 10083 - RNA, 19 nt, Artificial Sequence
  Synthetic
aaagacagcucgagugaga

SEQ ID NO: 10084 - RNA, 19 nt, Artificial Sequence
  Synthetic
gauaugguguucugugaua

SEQ ID NO: 10085 - RNA, 19 nt, Artificial Sequence
  Synthetic
aggcagaaagugaugggaa

SEQ ID NO: 10086 - RNA, 19 nt, Artificial Sequence
  Synthetic
agaaagaugaagaggacaa

SEQ ID NO: 10087 - RNA, 19 nt, Artificial Sequence
  Synthetic
gaauuuaaggagaugggaa

SEQ ID NO: 10088 - RNA, 19 nt, Artificial Sequence
  Synthetic
aauuuaaggagaugggaau

SEQ ID NO: 10089 - RNA, 19 nt, Artificial Sequence
  Synthetic
ccgaagaaggguggagcua

SEQ ID NO: 10090 - RNA, 19 nt, Artificial Sequence
  Synthetic
gagacaggaaugggagaaa

SEQ ID NO: 10091 - RNA, 19 nt, Artificial Sequence
  Synthetic
caaagaaagaugaagagga

SEQ ID NO: 10092 - RNA, 19 nt, Artificial Sequence
  Synthetic
ccaucuuagcagagaauga

SEQ ID NO: 10093 - RNA, 19 nt, Artificial Sequence
  Synthetic
cagagaaugaugaagucaa

SEQ ID NO: 10094 - RNA, 19 nt, Artificial Sequence
  Synthetic
ggaucgaauaugaugaaga

SEQ ID NO: 10095 - RNA, 19 nt, Artificial Sequence
  Synthetic
aaagaaagaugaagaggac

SEQ ID NO: 10096 - RNA, 19 nt, Artificial Sequence
  Synthetic
gaaucaugccauagagacu

SEQ ID NO: 10097 - RNA, 19 nt, Artificial Sequence
  Synthetic
cgaaguaagucguguauuu

SEQ ID NO: 10098 - RNA, 19 nt, Artificial Sequence
  Synthetic
gggaagaucaagaggguca

SEQ ID NO: 10099 - RNA, 19 nt, Artificial Sequence
  Synthetic
guaagagaggaaagagcaa

SEQ ID NO: 10100 - RNA, 19 nt, Artificial Sequence
  Synthetic
gggucacaccugagggcaa

SEQ ID NO: 10101 - RNA, 19 nt, Artificial Sequence
  Synthetic
aggcgaguuuauagaagaa

SEQ ID NO: 10102 - RNA, 19 nt, Artificial Sequence
  Synthetic
gcgaguuuauagaagaaaa

SEQ ID NO: 10103 - RNA, 19 nt, Artificial Sequence
  Synthetic
aagaagaagaagugcaucu

SEQ ID NO: 10104 - RNA, 19 nt, Artificial Sequence
  Synthetic
aagcaaagcugccucguga

SEQ ID NO: 10105 - RNA, 19 nt, Artificial Sequence
  Synthetic
acuuugacuuugaggagau

SEQ ID NO: 10106 - RNA, 19 nt, Artificial Sequence
  Synthetic
cagcagaaaaggcgaguuu

SEQ ID NO: 10107 - RNA, 19 nt, Artificial Sequence
  Synthetic
ccaaacugacggagggcca

SEQ ID NO: 10108 - RNA, 19 nt, Artificial Sequence
  Synthetic
agugacagaucgaggacca

SEQ ID NO: 10109 - RNA, 19 nt, Artificial Sequence
  Synthetic
aggggaagcugauggagaa

SEQ ID NO: 10110 - RNA, 19 nt, Artificial Sequence
  Synthetic
acgaauuccagcagcagaa

SEQ ID NO: 10111 - RNA, 19 nt, Artificial Sequence
  Synthetic
gcuggaaauucgagagcaa

SEQ ID NO: 10112 - RNA, 19 nt, Artificial Sequence
  Synthetic
uggcaagagugcaggcaaa

SEQ ID NO: 10113 - RNA, 19 nt, Artificial Sequence
  Synthetic
ugaaggaguuuguggacua

SEQ ID NO: 10114 - RNA, 19 nt, Artificial Sequence
  Synthetic
cauagaauguagcguguaa

SEQ ID NO: 10115 - RNA, 19 nt, Artificial Sequence
  Synthetic
gcucaaagauggaggcaag

SEQ ID NO: 10116 - RNA, 19 nt, Artificial Sequence
  Synthetic
cuucaaaccuucacagcua

SEQ ID NO: 10117 - RNA, 19 nt, Artificial Sequence
  Synthetic
agaugaagcugaaggaguu

SEQ ID NO: 10118 - RNA, 19 nt, Artificial Sequence
  Synthetic
agucagaggccaaguggaa

SEQ ID NO: 10119 - RNA, 19 nt, Artificial Sequence
  Synthetic
gagcaaaccaagagcaagu

SEQ ID NO: 10120 - RNA, 19 nt, Artificial Sequence
  Synthetic
cagcuggguugguguguua

SEQ ID NO: 10121 - RNA, 19 nt, Artificial Sequence
  Synthetic
gccucuagcuggaaacaaa

SEQ ID NO: 10122 - RNA, 19 nt, Artificial Sequence
  Synthetic
ucagugacgucgagaacua

SEQ ID NO: 10123 - RNA, 19 nt, Artificial Sequence
  Synthetic
uggcagagcaugaggacga

SEQ ID NO: 10124 - RNA, 19 nt, Artificial Sequence
  Synthetic
ccaacaaagaugugguuca

SEQ ID NO: 10125 - RNA, 19 nt, Artificial Sequence
  Synthetic
cuggaaacaaagacaauaa

SEQ ID NO: 10126 - RNA, 19 nt, Artificial Sequence
  Synthetic
caugggaaguccacaguaa

SEQ ID NO: 10127 - RNA, 19 nt, Artificial Sequence
  Synthetic
cagaaggacugcaagauga

SEQ ID NO: 10128 - RNA, 19 nt, Artificial Sequence
  Synthetic
gcaagaagaaagggaagaa

SEQ ID NO: 10129 - RNA, 19 nt, Artificial Sequence
  Synthetic
gcucaagaucgacgaguuu

SEQ ID NO: 10130 - RNA, 19 nt, Artificial Sequence
  Synthetic
ggaaguacaagaacagcaa

SEQ ID NO: 10131 - RNA, 19 nt, Artificial Sequence
  Synthetic
agauggaagaggagcagaa

SEQ ID NO: 10132 - RNA, 19 nt, Artificial Sequence
  Synthetic
gagcagaaaagcaagaaaa

SEQ ID NO: 10133 - RNA, 19 nt, Artificial Sequence
  Synthetic
ccaaggaggcacugaccaa

SEQ ID NO: 10134 - RNA, 19 nt, Artificial Sequence
  Synthetic
gagagcaaaccaagagcaa

SEQ ID NO: 10135 - RNA, 19 nt, Artificial Sequence
  Synthetic
guacauuucuuaugagcuu

SEQ ID NO: 10136 - RNA, 19 nt, Artificial Sequence
  Synthetic
auucaaaggcucucacaaa

SEQ ID NO: 10137 - RNA, 19 nt, Artificial Sequence
  Synthetic
caacaacaccgcugccaaa

SEQ ID NO: 10138 - RNA, 19 nt, Artificial Sequence
  Synthetic
cugcccaaacugugagaaa

SEQ ID NO: 10139 - RNA, 19 nt, Artificial Sequence
  Synthetic
cgucagaugagguguguga

SEQ ID NO: 10140 - RNA, 19 nt, Artificial Sequence
  Synthetic
gagcauaugaaguggaaag

SEQ ID NO: 10141 - RNA, 19 nt, Artificial Sequence
  Synthetic
ggacaaagaacgagagaaa

SEQ ID NO: 10142 - RNA, 19 nt, Artificial Sequence
  Synthetic
aggaagaucaagagaauaa

SEQ ID NO: 10143 - RNA, 19 nt, Artificial Sequence
  Synthetic
ggaucaaacuuuaguacaa

SEQ ID NO: 10144 - RNA, 19 nt, Artificial Sequence
  Synthetic
cagaaugaguccagaagaa

SEQ ID NO: 10145 - RNA, 19 nt, Artificial Sequence
  Synthetic
aggaaacuguggagaguaa

SEQ ID NO: 10146 - RNA, 19 nt, Artificial Sequence
  Synthetic
cagcaaaccuucaggauga

SEQ ID NO: 10147 - RNA, 19 nt, Artificial Sequence
  Synthetic
ggaaguaacugauggugaa

SEQ ID NO: 10148 - RNA, 19 nt, Artificial Sequence
  Synthetic
gggacaagguagaagaaaa

SEQ ID NO: 10149 - RNA, 19 nt, Artificial Sequence
  Synthetic
gcuuggagacgaagagaaa

SEQ ID NO: 10150 - RNA, 19 nt, Artificial Sequence
  Synthetic
gaacaagauucaaaggaga

SEQ ID NO: 10151 - RNA, 19 nt, Artificial Sequence
  Synthetic
ggagaaaaggacagggaua

SEQ ID NO: 10152 - RNA, 19 nt, Artificial Sequence
  Synthetic
ggaugaaggaguuguuaaa

SEQ ID NO: 10153 - RNA, 19 nt, Artificial Sequence
  Synthetic
ucaucagacuguagagaua

SEQ ID NO: 10154 - RNA, 19 nt, Artificial Sequence
  Synthetic
ccacauggcaacagguuua

SEQ ID NO: 10155 - RNA, 19 nt, Artificial Sequence
  Synthetic
gaaauaaaccucagcagaa

SEQ ID NO: 10156 - RNA, 19 nt, Artificial Sequence
  Synthetic
agaagaagcaccagaggaa

SEQ ID NO: 10157 - RNA, 19 nt, Artificial Sequence
  Synthetic
uuacacaagcagagaaaua

SEQ ID NO: 10158 - RNA, 19 nt, Artificial Sequence
  Synthetic
aaggaaacauagaugguaa

SEQ ID NO: 10159 - RNA, 19 nt, Artificial Sequence
  Synthetic
agauaagucagcagaaaua

SEQ ID NO: 10160 - RNA, 19 nt, Artificial Sequence
  Synthetic
gcgaggaagacaaagaaua

SEQ ID NO: 10161 - RNA, 19 nt, Artificial Sequence
  Synthetic
ggaagaggauaaacugaaa

SEQ ID NO: 10162 - RNA, 19 nt, Artificial Sequence
  Synthetic
ucacaagcaucaagguaua

SEQ ID NO: 10163 - RNA, 19 nt, Artificial Sequence
  Synthetic
aagcagagauaguaggaau

SEQ ID NO: 10164 - RNA, 19 nt, Artificial Sequence
  Synthetic
gcauagacgcagagacaga

SEQ ID NO: 10165 - RNA, 19 nt, Artificial Sequence
  Synthetic
ccaaagaagaagcagcaaa

SEQ ID NO: 10166 - RNA, 19 nt, Artificial Sequence
  Synthetic
gaggaagggcacaaagaua

SEQ ID NO: 10167 - RNA, 19 nt, Artificial Sequence
  Synthetic
acaaaucaauguagaggaa

SEQ ID NO: 10168 - RNA, 19 nt, Artificial Sequence
  Synthetic
gugaagaugcggagucuaa

SEQ ID NO: 10169 - RNA, 19 nt, Artificial Sequence
  Synthetic
aagcaaagauggagauagu

SEQ ID NO: 10170 - RNA, 19 nt, Artificial Sequence
  Synthetic
cggacaaauugaaguggua

SEQ ID NO: 10171 - RNA, 19 nt, Artificial Sequence
  Synthetic
gcauaugugaugaguguaa

SEQ ID NO: 10172 - RNA, 19 nt, Artificial Sequence
  Synthetic
gcgcauaugugaugagugu

SEQ ID NO: 10173 - RNA, 19 nt, Artificial Sequence
  Synthetic
gaagcgacgcccagugaaa

SEQ ID NO: 10174 - RNA, 19 nt, Artificial Sequence
  Synthetic
agacagaccucuucuauga

SEQ ID NO: 10175 - RNA, 19 nt, Artificial Sequence
  Synthetic
caaccaagaucuucuaaaa

SEQ ID NO: 10176 - RNA, 19 nt, Artificial Sequence
  Synthetic
ggacagagauggcugccca

SEQ ID NO: 10177 - RNA, 19 nt, Artificial Sequence
  Synthetic
gcaaagaucuguucuccau

SEQ ID NO: 10178 - RNA, 19 nt, Artificial Sequence
  Synthetic
gcaccauccaggagaagga

SEQ ID NO: 10179 - RNA, 19 nt, Artificial Sequence
  Synthetic
gugggaagcuaucagaaca

SEQ ID NO: 10180 - RNA, 19 nt, Artificial Sequence
  Synthetic
agagauggcugcccaaaga

SEQ ID NO: 10181 - RNA, 19 nt, Artificial Sequence
  Synthetic
aucggaagacugugugaaa

SEQ ID NO: 10182 - RNA, 19 nt, Artificial Sequence
  Synthetic
gaguguaacuauggaucuu

SEQ ID NO: 10183 - RNA, 19 nt, Artificial Sequence
  Synthetic
caggagaaggacagagaug

SEQ ID NO: 10184 - RNA, 19 nt, Artificial Sequence
  Synthetic
ugugauggcaaguguguga

SEQ ID NO: 10185 - RNA, 19 nt, Artificial Sequence
  Synthetic
gaaaaggauucuucacaga

SEQ ID NO: 10186 - RNA, 19 nt, Artificial Sequence
  Synthetic
gccuauuauuguaaggagu

SEQ ID NO: 10187 - RNA, 19 nt, Artificial Sequence
  Synthetic
gagcuauggcuaaacauca

SEQ ID NO: 10188 - RNA, 19 nt, Artificial Sequence
  Synthetic
cggcuuaguuaggagcuau

SEQ ID NO: 10189 - RNA, 19 nt, Artificial Sequence
  Synthetic
gcaagugugugauuuguga

SEQ ID NO: 10190 - RNA, 19 nt, Artificial Sequence
  Synthetic
ccagaaaacaugccuacua

SEQ ID NO: 10191 - RNA, 19 nt, Artificial Sequence
  Synthetic
gguguguggugggaagcua

SEQ ID NO: 10192 - RNA, 19 nt, Artificial Sequence
  Synthetic
ccucuucuaugaacgcaaa

SEQ ID NO: 10193 - RNA, 19 nt, Artificial Sequence
  Synthetic
gaaaacaugccuacuacua

SEQ ID NO: 10194 - RNA, 19 nt, Artificial Sequence
  Synthetic
aggagugccugcuagugua

SEQ ID NO: 10195 - RNA, 19 nt, Artificial Sequence
  Synthetic
uuuaacacuuguccagcua

SEQ ID NO: 10196 - RNA, 19 nt, Artificial Sequence
  Synthetic
gagaaauuggaaacucuuu

SEQ ID NO: 10197 - RNA, 19 nt, Artificial Sequence
  Synthetic
uaacacuuguccagcuaca

SEQ ID NO: 10198 - RNA, 19 nt, Artificial Sequence
  Synthetic
uugaggaacugacugugaa

SEQ ID NO: 10199 - RNA, 19 nt, Artificial Sequence
  Synthetic
auucacaggcaucaucaua

SEQ ID NO: 10200 - RNA, 19 nt, Artificial Sequence
  Synthetic
ugaaaggcauuuacuuguu

SEQ ID NO: 10201 - RNA, 19 nt, Artificial Sequence
  Synthetic
ccgcauuucuugagacuua

SEQ ID NO: 10202 - RNA, 19 nt, Artificial Sequence
  Synthetic
acaaaggacuucuggcaaa

SEQ ID NO: 10203 - RNA, 19 nt, Artificial Sequence
  Synthetic
gauccauacucaaaggaaa

SEQ ID NO: 10204 - RNA, 19 nt, Artificial Sequence
  Synthetic
caaggaauguggacaguua

SEQ ID NO: 10205 - RNA, 19 nt, Artificial Sequence
  Synthetic
aguaguuccuauagagaua

SEQ ID NO: 10206 - RNA, 19 nt, Artificial Sequence
  Synthetic
gaaguuagaccaagguaua

SEQ ID NO: 10207 - RNA, 19 nt, Artificial Sequence
  Synthetic
ggagauuaaacgaggaaaa

SEQ ID NO: 10208 - RNA, 19 nt, Artificial Sequence
  Synthetic
aaaugaagcacgaggaaaa

SEQ ID NO: 10209 - RNA, 19 nt, Artificial Sequence
  Synthetic
agaccaagguauacaguuu

SEQ ID NO: 10210 - RNA, 19 nt, Artificial Sequence
  Synthetic
guuaagagcauguuacuaa

SEQ ID NO: 10211 - RNA, 19 nt, Artificial Sequence
  Synthetic
gaaagauagacuugaguuu

SEQ ID NO: 10212 - RNA, 19 nt, Artificial Sequence
  Synthetic
gcuaaacaaucucgcauua

SEQ ID NO: 10213 - RNA, 19 nt, Artificial Sequence
  Synthetic
gaaaauaugucacgaggaa

SEQ ID NO: 10214 - RNA, 19 nt, Artificial Sequence
  Synthetic
agcucaaauacgagagaaa

SEQ ID NO: 10215 - RNA, 19 nt, Artificial Sequence
  Synthetic
caacagagcuccuucauuu

SEQ ID NO: 10216 - RNA, 19 nt, Artificial Sequence
  Synthetic
ugaaagucuugguggauuu

SEQ ID NO: 10217 - RNA, 19 nt, Artificial Sequence
  Synthetic
caugguaauuuguggauuu

SEQ ID NO: 10218 - RNA, 19 nt, Artificial Sequence
  Synthetic
aaucauggccagucaauaa

SEQ ID NO: 10219 - RNA, 19 nt, Artificial Sequence
  Synthetic
cuagauaaguggcugacua

SEQ ID NO: 10220 - RNA, 19 nt, Artificial Sequence
  Synthetic
ugagagagaugaagaagau

SEQ ID NO: 10221 - RNA, 19 nt, Artificial Sequence
  Synthetic
cgaagcugauuuagaagaa

SEQ ID NO: 10222 - RNA, 19 nt, Artificial Sequence
  Synthetic
gcuaugagcuccagugcuu

SEQ ID NO: 10223 - RNA, 19 nt, Artificial Sequence
  Synthetic
ggaacagaugaaauggaaa

SEQ ID NO: 10224 - RNA, 19 nt, Artificial Sequence
  Synthetic
guucguauguuaaagcaaa

SEQ ID NO: 10225 - RNA, 19 nt, Artificial Sequence
  Synthetic
ucaaauagagacaaggaau

SEQ ID NO: 10226 - RNA, 19 nt, Artificial Sequence
  Synthetic
uguaacagguggaaaauua

SEQ ID NO: 10227 - RNA, 19 nt, Artificial Sequence
  Synthetic
gcaaaggaaggccaagaaa

SEQ ID NO: 10228 - RNA, 19 nt, Artificial Sequence
  Synthetic
ugauaaagcucaaauacga

SEQ ID NO: 10229 - RNA, 19 nt, Artificial Sequence
  Synthetic
ggaaauguucuuuagagua

SEQ ID NO: 10230 - RNA, 19 nt, Artificial Sequence
  Synthetic
gcacgaagcugauguguuc

SEQ ID NO: 10231 - RNA, 19 nt, Artificial Sequence
  Synthetic
gcaagugcauacagaaaua

SEQ ID NO: 10232 - RNA, 19 nt, Artificial Sequence
  Synthetic
gaacauuucugcagagaca

SEQ ID NO: 10233 - RNA, 19 nt, Artificial Sequence
  Synthetic
gccaagacuaggaggguaa

SEQ ID NO: 10234 - RNA, 19 nt, Artificial Sequence
  Synthetic
ccgcaagugcauacagaaa

SEQ ID NO: 10235 - RNA, 19 nt, Artificial Sequence
  Synthetic
ccaacaaggaaaugcguuu

SEQ ID NO: 10236 - RNA, 19 nt, Artificial Sequence
  Synthetic
gagacagcuuugaggauga

SEQ ID NO: 10237 - RNA, 19 nt, Artificial Sequence
  Synthetic
gaaccuuccuuauuagaaa

SEQ ID NO: 10238 - RNA, 19 nt, Artificial Sequence
  Synthetic
gagacaacaccuuggaaga

SEQ ID NO: 10239 - RNA, 19 nt, Artificial Sequence
  Synthetic
gaggaaagcugcaucuuau

SEQ ID NO: 10240 - RNA, 19 nt, Artificial Sequence
  Synthetic
gguccaagggugucagaau

SEQ ID NO: 10241 - RNA, 19 nt, Artificial Sequence
  Synthetic
guaagaaaugggaguguga

SEQ ID NO: 10242 - RNA, 19 nt, Artificial Sequence
  Synthetic
gugcauuauuucugucuua

SEQ ID NO: 10243 - RNA, 19 nt, Artificial Sequence
  Synthetic
ucaaauguccacaguguaa

SEQ ID NO: 10244 - RNA, 19 nt, Artificial Sequence
  Synthetic
agaaggaaugccagagauu

SEQ ID NO: 10245 - RNA, 19 nt, Artificial Sequence
  Synthetic
cagugaaacaacuugauaa

SEQ ID NO: 10246 - RNA, 19 nt, Artificial Sequence
  Synthetic
ccagaugccaacaaggaaa

SEQ ID NO: 10247 - RNA, 19 nt, Artificial Sequence
  Synthetic
cagcaaagcauuucuucaa

SEQ ID NO: 10248 - RNA, 19 nt, Artificial Sequence
  Synthetic
ugccagagauugagaaaau

SEQ ID NO: 10249 - RNA, 19 nt, Artificial Sequence
  Synthetic
ggucgaacacguuuauuua

SEQ ID NO: 10250 - RNA, 19 nt, Artificial Sequence
  Synthetic
cuuauguugugaagacuua

SEQ ID NO: 10251 - RNA, 19 nt, Artificial Sequence
  Synthetic
gaucagugccucagaaacu

SEQ ID NO: 10252 - RNA, 19 nt, Artificial Sequence
  Synthetic
aaggaaugccagagauuga

SEQ ID NO: 10253 - RNA, 19 nt, Artificial Sequence
  Synthetic
ccaucugccuuguggccaa

SEQ ID NO: 10254 - RNA, 19 nt, Artificial Sequence
  Synthetic
ugacaaacaucgcccaaca

SEQ ID NO: 10255 - RNA, 19 nt, Artificial Sequence
  Synthetic
ggaggaaagcugcaucuua

SEQ ID NO: 10256 - RNA, 19 nt, Artificial Sequence
  Synthetic
gcaccuguccagugaaaca

SEQ ID NO: 10257 - RNA, 19 nt, Artificial Sequence
  Synthetic
cuucaaauguccacagugu

SEQ ID NO: 10258 - RNA, 19 nt, Artificial Sequence
  Synthetic
acaauaucagcgugcauua

SEQ ID NO: 10259 - RNA, 19 nt, Artificial Sequence
  Synthetic
cagcaccuguccagugaaa

SEQ ID NO: 10260 - RNA, 19 nt, Artificial Sequence
  Synthetic
gaaugaagacuguaaaaga

SEQ ID NO: 10261 - RNA, 19 nt, Artificial Sequence
  Synthetic
cuacauggcacuugaagaa

SEQ ID NO: 10262 - RNA, 19 nt, Artificial Sequence
  Synthetic
caaaguacccugaagacaa

SEQ ID NO: 10263 - RNA, 19 nt, Artificial Sequence
  Synthetic
ccuggaagaaggagaaauu

SEQ ID NO: 10264 - RNA, 19 nt, Artificial Sequence
  Synthetic
gaagaugacuccaguguga

SEQ ID NO: 10265 - RNA, 19 nt, Artificial Sequence
  Synthetic
gaggagugaccaagugaaa

SEQ ID NO: 10266 - RNA, 19 nt, Artificial Sequence
  Synthetic
gcaauuaccuugaagaagu

SEQ ID NO: 10267 - RNA, 19 nt, Artificial Sequence
  Synthetic
acaacaaccuugaagauga

SEQ ID NO: 10268 - RNA, 19 nt, Artificial Sequence
  Synthetic
auaucgaagccgagagcaa

SEQ ID NO: 10269 - RNA, 19 nt, Artificial Sequence
  Synthetic
cagcaauuaccuugaagaa

SEQ ID NO: 10270 - RNA, 19 nt, Artificial Sequence
  Synthetic
gcgaagaccuagaagugga

SEQ ID NO: 10271 - RNA, 19 nt, Artificial Sequence
  Synthetic
cuaaaugcuacuugagauu

SEQ ID NO: 10272 - RNA, 19 nt, Artificial Sequence
  Synthetic
uauucaugcuggauggaaa

SEQ ID NO: 10273 - RNA, 19 nt, Artificial Sequence
  Synthetic
gguaggagguauggaagaa

SEQ ID NO: 10274 - RNA, 19 nt, Artificial Sequence
  Synthetic
uggauuugcagauggguua

SEQ ID NO: 10275 - RNA, 19 nt, Artificial Sequence
  Synthetic
cagcaagcaaggagagcau

SEQ ID NO: 10276 - RNA, 19 nt, Artificial Sequence
  Synthetic
ggucgauguuccuguaauu

SEQ ID NO: 10277 - RNA, 19 nt, Artificial Sequence
  Synthetic
cuacaaauacugcgacgaa

SEQ ID NO: 10278 - RNA, 19 nt, Artificial Sequence
  Synthetic
gggaaaggauugccagcca

SEQ ID NO: 10279 - RNA, 19 nt, Artificial Sequence
  Synthetic
gggagaggcgagaguucaa

SEQ ID NO: 10280 - RNA, 19 nt, Artificial Sequence
  Synthetic
acaaauacugcgacgaaga

SEQ ID NO: 10281 - RNA, 19 nt, Artificial Sequence
  Synthetic
caauccaacaggaggguau

SEQ ID NO: 10282 - RNA, 19 nt, Artificial Sequence
  Synthetic
acgaagacucugacaguga

SEQ ID NO: 10283 - RNA, 19 nt, Artificial Sequence
  Synthetic
ccaaugacaaugagggcca

SEQ ID NO: 10284 - RNA, 19 nt, Artificial Sequence
  Synthetic
gaaccaaccugaauauuga

SEQ ID NO: 10285 - RNA, 19 nt, Artificial Sequence
  Synthetic
gaauauugauaaugaggac

SEQ ID NO: 10286 - RNA, 19 nt, Artificial Sequence
  Synthetic
gcuccaguaccaugagaau

SEQ ID NO: 10287 - RNA, 19 nt, Artificial Sequence
  Synthetic
cgacgaagacucugacagu

SEQ ID NO: 10288 - RNA, 19 nt, Artificial Sequence
  Synthetic
ggauugccagccagagaaa

SEQ ID NO: 10289 - RNA, 19 nt, Artificial Sequence
  Synthetic
gggaaagaagagcgggaac

SEQ ID NO: 10290 - RNA, 19 nt, Artificial Sequence
  Synthetic
uggaagaaggcaugcuuau

SEQ ID NO: 10291 - RNA, 19 nt, Artificial Sequence
  Synthetic
acacaaagggaaacagaaa

SEQ ID NO: 10292 - RNA, 19 nt, Artificial Sequence
  Synthetic
gggagaaauuccuugguua

SEQ ID NO: 10293 - RNA, 19 nt, Artificial Sequence
  Synthetic
acagagaggcagaggcaua

SEQ ID NO: 10294 - RNA, 19 nt, Artificial Sequence
  Synthetic
acaauaaccuggaggauga

SEQ ID NO: 10295 - RNA, 19 nt, Artificial Sequence
  Synthetic
guuauuacacaaagggaaa

SEQ ID NO: 10296 - RNA, 19 nt, Artificial Sequence
  Synthetic
uggcaaacauggagaagau

SEQ ID NO: 10297 - RNA, 19 nt, Artificial Sequence
  Synthetic
agaauaugauggagagcau

SEQ ID NO: 10298 - RNA, 19 nt, Artificial Sequence
  Synthetic
ugacaaagaugaagauagu

SEQ ID NO: 10299 - RNA, 19 nt, Artificial Sequence
  Synthetic
gcaaacauggagaagauaa

SEQ ID NO: 10300 - RNA, 19 nt, Artificial Sequence
  Synthetic
gagcauauuugauggcuuu

SEQ ID NO: 10301 - RNA, 19 nt, Artificial Sequence
  Synthetic
cagaugaccucuuaauaaa

SEQ ID NO: 10302 - RNA, 19 nt, Artificial Sequence
  Synthetic
gcagcagugaugagggaaa

SEQ ID NO: 10303 - RNA, 19 nt, Artificial Sequence
  Synthetic
agaugaguuugaagaguua

SEQ ID NO: 10304 - RNA, 19 nt, Artificial Sequence
  Synthetic
auacauggcacuagaagaa

SEQ ID NO: 10305 - RNA, 19 nt, Artificial Sequence
  Synthetic
ggaaagacagacagaacau

SEQ ID NO: 10306 - RNA, 19 nt, Artificial Sequence
  Synthetic
gugaagaauaugauggaga

SEQ ID NO: 10307 - RNA, 19 nt, Artificial Sequence
  Synthetic
gggcauauuuguagugaac

SEQ ID NO: 10308 - RNA, 19 nt, Artificial Sequence
  Synthetic
gagaaagcuuuaagagaaa

SEQ ID NO: 10309 - RNA, 19 nt, Artificial Sequence
  Synthetic
ggaaggaaaucuaaggaaa

SEQ ID NO: 10310 - RNA, 19 nt, Artificial Sequence
  Synthetic
ggaacuugguuuaggguua

SEQ ID NO: 10311 - RNA, 19 nt, Artificial Sequence
  Synthetic
ccacagagcuuguugagaa

SEQ ID NO: 10312 - RNA, 19 nt, Artificial Sequence
  Synthetic
gagcagaggccaugaauau

SEQ ID NO: 10313 - RNA, 19 nt, Artificial Sequence
  Synthetic
ugagaaagcuuuaagagaa

SEQ ID NO: 10314 - RNA, 19 nt, Artificial Sequence
  Synthetic
gcaccaagccgaaaguaaa

SEQ ID NO: 10315 - RNA, 19 nt, Artificial Sequence
  Synthetic
uuaacagucuugagagaaa

SEQ ID NO: 10316 - RNA, 19 nt, Artificial Sequence
  Synthetic
gagaaagaaaugaagagua

SEQ ID NO: 10317 - RNA, 19 nt, Artificial Sequence
  Synthetic
ggagagagcuuuaacugaa

SEQ ID NO: 10318 - RNA, 19 nt, Artificial Sequence
  Synthetic
ggaaagaaugugcuguuaa

SEQ ID NO: 10319 - RNA, 19 nt, Artificial Sequence
  Synthetic
ugauauauguggcaugaaa

SEQ ID NO: 10320 - RNA, 19 nt, Artificial Sequence
  Synthetic
agaaagaaaugaagaguag

SEQ ID NO: 10321 - RNA, 19 nt, Artificial Sequence
  Synthetic
gaaagaaugugcuguuaau

SEQ ID NO: 10322 - RNA, 19 nt, Artificial Sequence
  Synthetic
gcaaagaucaccaagaaga

SEQ ID NO: 10323 - RNA, 19 nt, Artificial Sequence
  Synthetic
gaagaaauucccagacaau

SEQ ID NO: 10324 - RNA, 19 nt, Artificial Sequence
  Synthetic
gauagaaaauggaccaaaa

SEQ ID NO: 10325 - RNA, 19 nt, Artificial Sequence
  Synthetic
uagcagagguuuaaaugua

SEQ ID NO: 10326 - RNA, 19 nt, Artificial Sequence
  Synthetic
ggaucugaauagagugaaa

SEQ ID NO: 10327 - RNA, 19 nt, Artificial Sequence
  Synthetic
agaccuaccuggcgagaaa

SEQ ID NO: 10328 - RNA, 19 nt, Artificial Sequence
  Synthetic
aaugaaacccagaagauua

SEQ ID NO: 10329 - RNA, 19 nt, Artificial Sequence
  Synthetic
gaggagggcuggacaagaa

SEQ ID NO: 10330 - RNA, 19 nt, Artificial Sequence
  Synthetic
gggccaaacaagugagguu

SEQ ID NO: 10331 - RNA, 19 nt, Artificial Sequence
  Synthetic
cagcaaagacagaaacuga

SEQ ID NO: 10332 - RNA, 19 nt, Artificial Sequence
  Synthetic
ccauccauguagaaagaua

SEQ ID NO: 10333 - RNA, 19 nt, Artificial Sequence
  Synthetic
ggaaugaaucaacgaauga

SEQ ID NO: 10334 - RNA, 19 nt, Artificial Sequence
  Synthetic
cuacagagaagguuccaaa

SEQ ID NO: 10335 - RNA, 19 nt, Artificial Sequence
  Synthetic
agauguggcugcucaauaa

SEQ ID NO: 10336 - RNA, 19 nt, Artificial Sequence
  Synthetic
cgacagcccagaagaggaa

SEQ ID NO: 10337 - RNA, 19 nt, Artificial Sequence
  Synthetic
gccaggagcucuucugaaa

SEQ ID NO: 10338 - RNA, 19 nt, Artificial Sequence
  Synthetic
ggggaaagaugcagcugua

SEQ ID NO: 10339 - RNA, 19 nt, Artificial Sequence
  Synthetic
cugaauagagugaaagguu

SEQ ID NO: 10340 - RNA, 19 nt, Artificial Sequence
  Synthetic
cccuagagguuuauuacua

SEQ ID NO: 10341 - RNA, 19 nt, Artificial Sequence
  Synthetic
gaaacagauugaugcagau

SEQ ID NO: 10342 - RNA, 19 nt, Artificial Sequence
  Synthetic
acaaugaaacccagaagau

SEQ ID NO: 10343 - RNA, 19 nt, Artificial Sequence
  Synthetic
ggugaguggcccagaaguu

SEQ ID NO: 10344 - RNA, 19 nt, Artificial Sequence
  Synthetic
ccaggaaggucaucaagau

SEQ ID NO: 10345 - RNA, 19 nt, Artificial Sequence
  Synthetic
gaggaugucuccaauacaa

SEQ ID NO: 10346 - RNA, 19 nt, Artificial Sequence
  Synthetic
gcgcuggugcagaggauga

SEQ ID NO: 10347 - RNA, 19 nt, Artificial Sequence
  Synthetic
ggagcaggauagugccuuu

SEQ ID NO: 10348 - RNA, 19 nt, Artificial Sequence
  Synthetic
aggaggagcuggacgccau

SEQ ID NO: 10349 - RNA, 19 nt, Artificial Sequence
  Synthetic
cgacaucagcgcagagauc

SEQ ID NO: 10350 - RNA, 19 nt, Artificial Sequence
  Synthetic
gagcacagggacuggcuau

SEQ ID NO: 10351 - RNA, 19 nt, Artificial Sequence
  Synthetic
gaggaggcagagagaguga

SEQ ID NO: 10352 - RNA, 19 nt, Artificial Sequence
  Synthetic
gcaaccagucggugcguga

SEQ ID NO: 10353 - RNA, 19 nt, Artificial Sequence
  Synthetic
ccaaauuucccuucucuaa

SEQ ID NO: 10354 - RNA, 19 nt, Artificial Sequence
  Synthetic
ccacaggccucuggaauca

SEQ ID NO: 10355 - RNA, 19 nt, Artificial Sequence
  Synthetic
ccuccuggcugcacagaca

SEQ ID NO: 10356 - RNA, 19 nt, Artificial Sequence
  Synthetic
agaagaagaaaguggacaa

SEQ ID NO: 10357 - RNA, 19 nt, Artificial Sequence
  Synthetic
uggagaauguggagaguga

SEQ ID NO: 10358 - RNA, 19 nt, Artificial Sequence
  Synthetic
aauaauagacccagaugaa

SEQ ID NO: 10359 - RNA, 19 nt, Artificial Sequence
  Synthetic
ccuaugaggcaguggaaca

SEQ ID NO: 10360 - RNA, 19 nt, Artificial Sequence
  Synthetic
gcuaccaguuugugaagaa

SEQ ID NO: 10361 - RNA, 19 nt, Artificial Sequence
  Synthetic
ccaccgagcagcagaggaa

SEQ ID NO: 10362 - RNA, 19 nt, Artificial Sequence
  Synthetic
guacauuaccugugcugaa

SEQ ID NO: 10363 - RNA, 19 nt, Artificial Sequence
  Synthetic
gaagcgagcagcagaggaa

SEQ ID NO: 10364 - RNA, 19 nt, Artificial Sequence
  Synthetic
gugccuaccuggacaagaa

SEQ ID NO: 10365 - RNA, 19 nt, Artificial Sequence
  Synthetic
aggcaguggaacagcuaaa

SEQ ID NO: 10366 - RNA, 19 nt, Artificial Sequence
  Synthetic
cugaugaccacuagaggua

SEQ ID NO: 10367 - RNA, 19 nt, Artificial Sequence
  Synthetic
agcuaaauaucaaggccaa

SEQ ID NO: 10368 - RNA, 19 nt, Artificial Sequence
  Synthetic
ccacugagggcacgauuua

SEQ ID NO: 10369 - RNA, 19 nt, Artificial Sequence
  Synthetic
uggaacagcuaaauaucaa

SEQ ID NO: 10370 - RNA, 19 nt, Artificial Sequence
  Synthetic
uaauagacccagaugaaga

SEQ ID NO: 10371 - RNA, 19 nt, Artificial Sequence
  Synthetic
ccaagaacagugaggggaa

SEQ ID NO: 10372 - RNA, 19 nt, Artificial Sequence
  Synthetic
ggacggcagcauugaguuu

SEQ ID NO: 10373 - RNA, 19 nt, Artificial Sequence
  Synthetic
acgaggaugugcugcgcua

SEQ ID NO: 10374 - RNA, 19 nt, Artificial Sequence
  Synthetic
uugugaagaagaagggcua

SEQ ID NO: 10375 - RNA, 19 nt, Artificial Sequence
  Synthetic
ccaacaagggcgaccucaa

SEQ ID NO: 10376 - RNA, 19 nt, Artificial Sequence
  Synthetic
agaagaaaguggacaagcu

SEQ ID NO: 10377 - RNA, 19 nt, Artificial Sequence
  Synthetic
auaucaaggccaagaacuu

SEQ ID NO: 10378 - RNA, 19 nt, Artificial Sequence
  Synthetic
gcaagaagcauuauuacga

SEQ ID NO: 10379 - RNA, 19 nt, Artificial Sequence
  Synthetic
gcacaguaggacacaguga

SEQ ID NO: 10380 - RNA, 19 nt, Artificial Sequence
  Synthetic
guucaaaggggacgagauu

SEQ ID NO: 10381 - RNA, 19 nt, Artificial Sequence
  Synthetic
uuccauggcuuaagaagua

SEQ ID NO: 10382 - RNA, 19 nt, Artificial Sequence
  Synthetic
agaccaaagugaagagcag

SEQ ID NO: 10383 - RNA, 19 nt, Artificial Sequence
  Synthetic
ccaaacaggacccgucuua

SEQ ID NO: 10384 - RNA, 19 nt, Artificial Sequence
  Synthetic
uggcaucgucuuugacuua

SEQ ID NO: 10385 - RNA, 19 nt, Artificial Sequence
  Synthetic
cugaauacacucacuuuua

SEQ ID NO: 10386 - RNA, 19 nt, Artificial Sequence
  Synthetic
gaagauaaauggaggugaa

SEQ ID NO: 10387 - RNA, 19 nt, Artificial Sequence
  Synthetic
ggagagaagcaucggauua

SEQ ID NO: 10388 - RNA, 19 nt, Artificial Sequence
  Synthetic
ccucaaguuuggugauaaa

SEQ ID NO: 10389 - RNA, 19 nt, Artificial Sequence
  Synthetic
ggacagagguauaucauga

SEQ ID NO: 10390 - RNA, 19 nt, Artificial Sequence
  Synthetic
ugugagaagaugagcaaua

SEQ ID NO: 10391 - RNA, 19 nt, Artificial Sequence
  Synthetic
caacaaaauccaagaagaa

SEQ ID NO: 10392 - RNA, 19 nt, Artificial Sequence
  Synthetic
ccgauaacuaugagaaauu

SEQ ID NO: 10393 - RNA, 19 nt, Artificial Sequence
  Synthetic
gagcaaaguguucgggauu

SEQ ID NO: 10394 - RNA, 19 nt, Artificial Sequence
  Synthetic
ccaaacagggucagauuua

SEQ ID NO: 10395 - RNA, 19 nt, Artificial Sequence
  Synthetic
gggcugaucaugaagauua

SEQ ID NO: 10396 - RNA, 19 nt, Artificial Sequence
  Synthetic
gauaaauggaggugaaguu

SEQ ID NO: 10397 - RNA, 19 nt, Artificial Sequence
  Synthetic
cagugugguuugaagauaa

SEQ ID NO: 10398 - RNA, 19 nt, Artificial Sequence
  Synthetic
acucggaagaagaaggaua

SEQ ID NO: 10399 - RNA, 19 nt, Artificial Sequence
  Synthetic
guaggaaaguugugaaaau

SEQ ID NO: 10400 - RNA, 19 nt, Artificial Sequence
  Synthetic
agaguuguguccagagaaa

SEQ ID NO: 10401 - RNA, 19 nt, Artificial Sequence
  Synthetic
ggaagaagaaggauauuuu

SEQ ID NO: 10402 - RNA, 19 nt, Artificial Sequence
  Synthetic
cagugaagaauuuuggaaa

SEQ ID NO: 10403 - RNA, 19 nt, Artificial Sequence
  Synthetic
gggauuggauguugauuuu

SEQ ID NO: 10404 - RNA, 19 nt, Artificial Sequence
  Synthetic
aaaguaagaccgaguuaaa

SEQ ID NO: 10405 - RNA, 19 nt, Artificial Sequence
  Synthetic
ggucagauuuacugcucaa

SEQ ID NO: 10406 - RNA, 19 nt, Artificial Sequence
  Synthetic
cagcaugugacgagauaau

SEQ ID NO: 10407 - RNA, 19 nt, Artificial Sequence
  Synthetic
aggauauuuucuuggacaa

SEQ ID NO: 10408 - RNA, 19 nt, Artificial Sequence
  Synthetic
caguuuggucagaggacaa

SEQ ID NO: 10409 - RNA, 19 nt, Artificial Sequence
  Synthetic
gaaagaagcacugggaaga

SEQ ID NO: 10410 - RNA, 19 nt, Artificial Sequence
  Synthetic
agaaagaagcacugggaag

SEQ ID NO: 10411 - RNA, 19 nt, Artificial Sequence
  Synthetic
agaccgaguuaaagcaaaa

SEQ ID NO: 10412 - RNA, 19 nt, Artificial Sequence
  Synthetic
cagaagauugugagaagau

SEQ ID NO: 10413 - RNA, 19 nt, Artificial Sequence
  Synthetic
gagagaagcaucggauuaa

SEQ ID NO: 10414 - RNA, 19 nt, Artificial Sequence
  Synthetic
cugggaggacagagguaua

SEQ ID NO: 10415 - RNA, 19 nt, Artificial Sequence
  Synthetic
gaacaaguuuugccaguga

SEQ ID NO: 10416 - RNA, 19 nt, Artificial Sequence
  Synthetic
caacaguccuggagagaaa

SEQ ID NO: 10417 - RNA, 19 nt, Artificial Sequence
  Synthetic
ggaacaagauggagcagaa

SEQ ID NO: 10418 - RNA, 19 nt, Artificial Sequence
  Synthetic
caggagagcuacagugaua

SEQ ID NO: 10419 - RNA, 19 nt, Artificial Sequence
  Synthetic
ccaaauaugaggaggaaga

SEQ ID NO: 10420 - RNA, 19 nt, Artificial Sequence
  Synthetic
gggaagagcccuaccauua

SEQ ID NO: 10421 - RNA, 19 nt, Artificial Sequence
  Synthetic
ggaaaagacagaagagcaa

SEQ ID NO: 10422 - RNA, 19 nt, Artificial Sequence
  Synthetic
gcgaugagcugcugcacaa

SEQ ID NO: 10423 - RNA, 19 nt, Artificial Sequence
  Synthetic
acauauagguaucgaccaa

SEQ ID NO: 10424 - RNA, 19 nt, Artificial Sequence
  Synthetic
accaggagauggagggaaa

SEQ ID NO: 10425 - RNA, 19 nt, Artificial Sequence
  Synthetic
ugaaauacacagaggacau

SEQ ID NO: 10426 - RNA, 19 nt, Artificial Sequence
  Synthetic
ggaggaagaggaagaggaa

SEQ ID NO: 10427 - RNA, 19 nt, Artificial Sequence
  Synthetic
agucagaguuucagugaga

SEQ ID NO: 10428 - RNA, 19 nt, Artificial Sequence
  Synthetic
cuacaguccaggagggcaa

SEQ ID NO: 10429 - RNA, 19 nt, Artificial Sequence
  Synthetic
gaucaaugguggagacauc

SEQ ID NO: 10430 - RNA, 19 nt, Artificial Sequence
  Synthetic
ggagagaaacugcgaauca

SEQ ID NO: 10431 - RNA, 19 nt, Artificial Sequence
  Synthetic
ggagaagaccaucagcaaa

SEQ ID NO: 10432 - RNA, 19 nt, Artificial Sequence
  Synthetic
gcaaugagcuccuggugga

SEQ ID NO: 10433 - RNA, 19 nt, Artificial Sequence
  Synthetic
gggcuauuuccuaggagaa

SEQ ID NO: 10434 - RNA, 19 nt, Artificial Sequence
  Synthetic
agucugacaacgagggcua

SEQ ID NO: 10435 - RNA, 19 nt, Artificial Sequence
  Synthetic
cagaagagaaagucccuua

SEQ ID NO: 10436 - RNA, 19 nt, Artificial Sequence
  Synthetic
augaggaggaagaggaaga

SEQ ID NO: 10437 - RNA, 19 nt, Artificial Sequence
  Synthetic
gagcagaaccagacccaga

SEQ ID NO: 10438 - RNA, 19 nt, Artificial Sequence
  Synthetic
ucugagaagcugagcaaca

SEQ ID NO: 10439 - RNA, 19 nt, Artificial Sequence
  Synthetic
uguuugacuuucagaggaa

SEQ ID NO: 10440 - RNA, 19 nt, Artificial Sequence
  Synthetic
cagcaaagacucuggaaug

SEQ ID NO: 10441 - RNA, 19 nt, Artificial Sequence
  Synthetic
gggaagauauacuguggca

SEQ ID NO: 10442 - RNA, 19 nt, Artificial Sequence
  Synthetic
gaaugaaugugucugagaa

SEQ ID NO: 10443 - RNA, 19 nt, Artificial Sequence
  Synthetic
agugauaugucuagucaga

SEQ ID NO: 10444 - RNA, 19 nt, Artificial Sequence
  Synthetic
cggaggagcccaugcugaa

SEQ ID NO: 10445 - RNA, 19 nt, Artificial Sequence
  Synthetic
uggagaagaccaucagcaa

SEQ ID NO: 10446 - RNA, 19 nt, Artificial Sequence
  Synthetic
gcgcaagaagagagggaag

SEQ ID NO: 10447 - RNA, 19 nt, Artificial Sequence
  Synthetic
agguaaagucacugaucuu

SEQ ID NO: 10448 - RNA, 19 nt, Artificial Sequence
  Synthetic
ggccauaccaagaagguca

SEQ ID NO: 10449 - RNA, 19 nt, Artificial Sequence
  Synthetic
ccauggacucucagaucaa

SEQ ID NO: 10450 - RNA, 19 nt, Artificial Sequence
  Synthetic
gaugaucaguacugggcuu

SEQ ID NO: 10451 - RNA, 19 nt, Artificial Sequence
  Synthetic
caucaaaguugcucaccca

SEQ ID NO: 10452 - RNA, 19 nt, Artificial Sequence
  Synthetic
gagcgcaagaagagaggga

SEQ ID NO: 10453 - RNA, 19 nt, Artificial Sequence
  Synthetic
gagggaagacugugccuga

SEQ ID NO: 10454 - RNA, 19 nt, Artificial Sequence
  Synthetic
aaacagagugcuaagaaua

SEQ ID NO: 10455 - RNA, 19 nt, Artificial Sequence
  Synthetic
cagaagaacuuggagcaaa

SEQ ID NO: 10456 - RNA, 19 nt, Artificial Sequence
  Synthetic
gagaaugcgaagagugcaa

SEQ ID NO: 10457 - RNA, 19 nt, Artificial Sequence
  Synthetic
gcacagaaguacacagucu

SEQ ID NO: 10458 - RNA, 19 nt, Artificial Sequence
  Synthetic
gcuuugagccagaggugaa

SEQ ID NO: 10459 - RNA, 19 nt, Artificial Sequence
  Synthetic
aaacaagguuggauucuaa

SEQ ID NO: 10460 - RNA, 19 nt, Artificial Sequence
  Synthetic
caagaauaauggacagcuu

SEQ ID NO: 10461 - RNA, 19 nt, Artificial Sequence
  Synthetic
gcuaugauuuguuucgaaa

SEQ ID NO: 10462 - RNA, 19 nt, Artificial Sequence
  Synthetic
caaacagagugcuaagaau

SEQ ID NO: 10463 - RNA, 19 nt, Artificial Sequence
  Synthetic
aggcaugacugaaaucuaa

SEQ ID NO: 10464 - RNA, 19 nt, Artificial Sequence
  Synthetic
caccauaggaugugagcau

SEQ ID NO: 10465 - RNA, 19 nt, Artificial Sequence
  Synthetic
ggacagucaguuuugaaua

SEQ ID NO: 10466 - RNA, 19 nt, Artificial Sequence
  Synthetic
ccauaggaugugagcauau

SEQ ID NO: 10467 - RNA, 19 nt, Artificial Sequence
  Synthetic
gguuggauucuaaagauaa

SEQ ID NO: 10468 - RNA, 19 nt, Artificial Sequence
  Synthetic
ugagggagcugcaggaaca

SEQ ID NO: 10469 - RNA, 19 nt, Artificial Sequence
  Synthetic
cagagaauguuucagagaa

SEQ ID NO: 10470 - RNA, 19 nt, Artificial Sequence
  Synthetic
uggcaaagaaugcgcucua

SEQ ID NO: 10471 - RNA, 19 nt, Artificial Sequence
  Synthetic
cauccuaaguauaccauuu

SEQ ID NO: 10472 - RNA, 19 nt, Artificial Sequence
  Synthetic
ucgagaugucagaaguaaa

SEQ ID NO: 10473 - RNA, 19 nt, Artificial Sequence
  Synthetic
agacauggcuuccagaaaa

SEQ ID NO: 10474 - RNA, 19 nt, Artificial Sequence
  Synthetic
guccagaaguugaaagcca

SEQ ID NO: 10475 - RNA, 19 nt, Artificial Sequence
  Synthetic
gugaaguuggcuuugaaua

SEQ ID NO: 10476 - RNA, 19 nt, Artificial Sequence
  Synthetic
gaaauuaggugggcugauu

SEQ ID NO: 10477 - RNA, 19 nt, Artificial Sequence
  Synthetic
aagacaagcuuuccagaga

SEQ ID NO: 10478 - RNA, 19 nt, Artificial Sequence
  Synthetic
cgagaugucagaaguaaau

SEQ ID NO: 10479 - RNA, 19 nt, Artificial Sequence
  Synthetic
gcaaacagagugcuaagaa

SEQ ID NO: 10480 - RNA, 19 nt, Artificial Sequence
  Synthetic
ccagagaauguuucagaga

SEQ ID NO: 10481 - RNA, 19 nt, Artificial Sequence
  Synthetic
agacaagcuuuccagagaa

SEQ ID NO: 10482 - RNA, 19 nt, Artificial Sequence
  Synthetic
agucaagcagugugugaau

SEQ ID NO: 10483 - RNA, 19 nt, Artificial Sequence
  Synthetic
guuggaugcacuugaacua

SEQ ID NO: 10484 - RNA, 19 nt, Artificial Sequence
  Synthetic
ggguauggaucgauggauu

SEQ ID NO: 10485 - RNA, 19 nt, Artificial Sequence
  Synthetic
acagaagagcaaagaauaa

SEQ ID NO: 10486 - RNA, 19 nt, Artificial Sequence
  Synthetic
gggaagauuuuguaccaua

SEQ ID NO: 10487 - RNA, 19 nt, Artificial Sequence
  Synthetic
uuaagaagauugaggaaca

SEQ ID NO: 10488 - RNA, 19 nt, Artificial Sequence
  Synthetic
guacagaagagcaaagaau

SEQ ID NO: 10489 - RNA, 19 nt, Artificial Sequence
  Synthetic
aggaagaaauaguacagaa

SEQ ID NO: 10490 - RNA, 19 nt, Artificial Sequence
  Synthetic
gauuaagaagauugaggaa

SEQ ID NO: 10491 - RNA, 19 nt, Artificial Sequence
  Synthetic
gguauggaucgauggauua

SEQ ID NO: 10492 - RNA, 19 nt, Artificial Sequence
  Synthetic
agacaggagucaucagauu

SEQ ID NO: 10493 - RNA, 19 nt, Artificial Sequence
  Synthetic
cgagcaagguacugagcuu

SEQ ID NO: 10494 - RNA, 19 nt, Artificial Sequence
  Synthetic
gcgacagggacguaggcaa

SEQ ID NO: 10495 - RNA, 19 nt, Artificial Sequence
  Synthetic
uggacuggcuacaggagaa

SEQ ID NO: 10496 - RNA, 19 nt, Artificial Sequence
  Synthetic
ggauagugcugcugcggca

SEQ ID NO: 10497 - RNA, 19 nt, Artificial Sequence
  Synthetic
gcauuguagauucaagaaa

SEQ ID NO: 10498 - RNA, 19 nt, Artificial Sequence
  Synthetic
ggaagauggaagucgcauu

SEQ ID NO: 10499 - RNA, 19 nt, Artificial Sequence
  Synthetic
auaaucuccuguaggguaa

SEQ ID NO: 10500 - RNA, 19 nt, Artificial Sequence
  Synthetic
gaucgauggauuaagaaga

SEQ ID NO: 10501 - RNA, 19 nt, Artificial Sequence
  Synthetic
ggaagaaauaguacagaag

SEQ ID NO: 10502 - RNA, 19 nt, Artificial Sequence
  Synthetic
ggaagauuuuguaccauau

SEQ ID NO: 10503 - RNA, 19 nt, Artificial Sequence
  Synthetic
ugacgugggugaaggaguu

SEQ ID NO: 10504 - RNA, 19 nt, Artificial Sequence
  Synthetic
gguaagaagugucaacugu

SEQ ID NO: 10505 - RNA, 19 nt, Artificial Sequence
  Synthetic
agaaacagcugcaaaauuu

SEQ ID NO: 10506 - RNA, 19 nt, Artificial Sequence
  Synthetic
ccuaugacuuccugcucaa

SEQ ID NO: 10507 - RNA, 19 nt, Artificial Sequence
  Synthetic
gggacguaggcaagaguga

SEQ ID NO: 10508 - RNA, 19 nt, Artificial Sequence
  Synthetic
gccaugggaggaagaaaua

SEQ ID NO: 10509 - RNA, 19 nt, Artificial Sequence
  Synthetic
cugugcaucugguggacaa

SEQ ID NO: 10510 - RNA, 19 nt, Artificial Sequence
  Synthetic
cuaaaauccugguggggaa

SEQ ID NO: 10511 - RNA, 19 nt, Artificial Sequence
  Synthetic
gugaaggaguucuuauuga

SEQ ID NO: 10512 - RNA, 19 nt, Artificial Sequence
  Synthetic
gcuaagggccugaaugcca

SEQ ID NO: 10513 - RNA, 19 nt, Artificial Sequence
  Synthetic
uggcugauaggcugaauaa

SEQ ID NO: 10514 - RNA, 19 nt, Artificial Sequence
  Synthetic
cggcauugaucgauggauu

SEQ ID NO: 10515 - RNA, 19 nt, Artificial Sequence
  Synthetic
cugcagauguagagguuau

SEQ ID NO: 10516 - RNA, 19 nt, Artificial Sequence
  Synthetic
aggaaggcacugaaagaaa

SEQ ID NO: 10517 - RNA, 19 nt, Artificial Sequence
  Synthetic
caguaaagaaugaagugaa

SEQ ID NO: 10518 - RNA, 19 nt, Artificial Sequence
  Synthetic
auguagagguuaugugcaa

SEQ ID NO: 10519 - RNA, 19 nt, Artificial Sequence
  Synthetic
aggaagagcuguuucagua

SEQ ID NO: 10520 - RNA, 19 nt, Artificial Sequence
  Synthetic
ccaaagauaccucuaguua

SEQ ID NO: 10521 - RNA, 19 nt, Artificial Sequence
  Synthetic
caauggaauuugagaagca

SEQ ID NO: 10522 - RNA, 19 nt, Artificial Sequence
  Synthetic
gaagaaaaugccaaagaua

SEQ ID NO: 10523 - RNA, 19 nt, Artificial Sequence
  Synthetic
gcgggauaauuuagaguca

SEQ ID NO: 10524 - RNA, 19 nt, Artificial Sequence
  Synthetic
ggauuaaggagaucgauga

SEQ ID NO: 10525 - RNA, 19 nt, Artificial Sequence
  Synthetic
cuacaaguuaugaagcuaa

SEQ ID NO: 10526 - RNA, 19 nt, Artificial Sequence
  Synthetic
ggaagagcuguuucaguaa

SEQ ID NO: 10527 - RNA, 19 nt, Artificial Sequence
  Synthetic
ccaagauccugguggggaa

SEQ ID NO: 10528 - RNA, 19 nt, Artificial Sequence
  Synthetic
gaucgauggauuaaggaga

SEQ ID NO: 10529 - RNA, 19 nt, Artificial Sequence
  Synthetic
ggcauugaucgauggauua

SEQ ID NO: 10530 - RNA, 19 nt, Artificial Sequence
  Synthetic
gaaagaaacacggcggaau

SEQ ID NO: 10531 - RNA, 19 nt, Artificial Sequence
  Synthetic
gggauaauuuagagucacu

SEQ ID NO: 10532 - RNA, 19 nt, Artificial Sequence
  Synthetic
uaaggaaggcacugaaaga

SEQ ID NO: 10533 - RNA, 19 nt, Artificial Sequence
  Synthetic
gcaugaagcucuuguuuuc

SEQ ID NO: 10534 - RNA, 19 nt, Artificial Sequence
  Synthetic
caggagaagcucggcguua

SEQ ID NO: 10535 - RNA, 19 nt, Artificial Sequence
  Synthetic
ccuacgacuuucugcucaa

SEQ ID NO: 10536 - RNA, 19 nt, Artificial Sequence
  Synthetic
gggaagaaaaugccaaaga

SEQ ID NO: 10537 - RNA, 19 nt, Artificial Sequence
  Synthetic
auaaaacgcugcagaugua

SEQ ID NO: 10538 - RNA, 19 nt, Artificial Sequence
  Synthetic
caccagaaacagcugcaaa

SEQ ID NO: 10539 - RNA, 19 nt, Artificial Sequence
  Synthetic
caaagauaccucuaguuau

SEQ ID NO: 10540 - RNA, 19 nt, Artificial Sequence
  Synthetic
gaagagcuguuucaguaaa

SEQ ID NO: 10541 - RNA, 19 nt, Artificial Sequence
  Synthetic
gcgcguacgcagagaagaa

SEQ ID NO: 10542 - RNA, 19 nt, Artificial Sequence
  Synthetic
gagaagaucuggaggccca

SEQ ID NO: 10543 - RNA, 19 nt, Artificial Sequence
  Synthetic
ugaacuaccagaugaguaa

SEQ ID NO: 10544 - RNA, 19 nt, Artificial Sequence
  Synthetic
agagcuaucuguagacuua

SEQ ID NO: 10545 - RNA, 19 nt, Artificial Sequence
  Synthetic
gaacaaaccucacagacuu

SEQ ID NO: 10546 - RNA, 19 nt, Artificial Sequence
  Synthetic
ccuggagagugcagagcua

SEQ ID NO: 10547 - RNA, 19 nt, Artificial Sequence
  Synthetic
cagaacugcucgcggagua

SEQ ID NO: 10548 - RNA, 19 nt, Artificial Sequence
  Synthetic
cggaguaacugcaagaucu

SEQ ID NO: 10549 - RNA, 19 nt, Artificial Sequence
  Synthetic
cggugaagagcuacgacua

SEQ ID NO: 10550 - RNA, 19 nt, Artificial Sequence
  Synthetic
gagaagaacugcaugaccu

SEQ ID NO: 10551 - RNA, 19 nt, Artificial Sequence
  Synthetic
ggcaaggcauccugugaau

SEQ ID NO: 10552 - RNA, 19 nt, Artificial Sequence
  Synthetic
gcgagauccuggagagccu

SEQ ID NO: 10553 - RNA, 19 nt, Artificial Sequence
  Synthetic
guaacgggaucgacuacaa

SEQ ID NO: 10554 - RNA, 19 nt, Artificial Sequence
  Synthetic
ccgccuacguggagacugu

SEQ ID NO: 10555 - RNA, 19 nt, Artificial Sequence
  Synthetic
ccacacagcugccucagaa

SEQ ID NO: 10556 - RNA, 19 nt, Artificial Sequence
  Synthetic
gaaucuuggucggaaacaa

SEQ ID NO: 10557 - RNA, 19 nt, Artificial Sequence
  Synthetic
gcaguccggugaagagcua

SEQ ID NO: 10558 - RNA, 19 nt, Artificial Sequence
  Synthetic
ucaaggagaucgaugagca

SEQ ID NO: 10559 - RNA, 19 nt, Artificial Sequence
  Synthetic
caaggagaucgaugagcau

SEQ ID NO: 10560 - RNA, 19 nt, Artificial Sequence
  Synthetic
aggcuggagcucugggaca

SEQ ID NO: 10561 - RNA, 19 nt, Artificial Sequence
  Synthetic
ugaacaaaccucacagacu

SEQ ID NO: 10562 - RNA, 19 nt, Artificial Sequence
  Synthetic
auagagaacacuucacuuu

SEQ ID NO: 10563 - RNA, 19 nt, Artificial Sequence
  Synthetic
ggcacggcauggagaagau

SEQ ID NO: 10564 - RNA, 19 nt, Artificial Sequence
  Synthetic
acgacuaccugcucaaguu

SEQ ID NO: 10565 - RNA, 19 nt, Artificial Sequence
  Synthetic
ggauccucuugguguauga

SEQ ID NO: 10566 - RNA, 19 nt, Artificial Sequence
  Synthetic
gggcccuuguuugggauua

SEQ ID NO: 10567 - RNA, 19 nt, Artificial Sequence
  Synthetic
acaguaacgggaucgacua

SEQ ID NO: 10568 - RNA, 19 nt, Artificial Sequence
  Synthetic
agacuuaggaauacuugau

SEQ ID NO: 10569 - RNA, 19 nt, Artificial Sequence
  Synthetic
uggcaaggcauccugugaa

SEQ ID NO: 10570 - RNA, 19 nt, Artificial Sequence
  Synthetic
ggugaagagcuacgacuac

SEQ ID NO: 10571 - RNA, 19 nt, Artificial Sequence
  Synthetic
gcaagaaacaguugaguua

SEQ ID NO: 10572 - RNA, 19 nt, Artificial Sequence
  Synthetic
gaaauggauuggucagaaa

SEQ ID NO: 10573 - RNA, 19 nt, Artificial Sequence
  Synthetic
ccaagaaacaagcguaaua

SEQ ID NO: 10574 - RNA, 19 nt, Artificial Sequence
  Synthetic
ggagcagguuaauggauaa

SEQ ID NO: 10575 - RNA, 19 nt, Artificial Sequence
  Synthetic
gcuaaaagagcauggauua

SEQ ID NO: 10576 - RNA, 19 nt, Artificial Sequence
  Synthetic
gauaauaugaccucaguaa

SEQ ID NO: 10577 - RNA, 19 nt, Artificial Sequence
  Synthetic
gggagcagguuaauggaua

SEQ ID NO: 10578 - RNA, 19 nt, Artificial Sequence
  Synthetic
acaaaggaccaaacagaaa

SEQ ID NO: 10579 - RNA, 19 nt, Artificial Sequence
  Synthetic
gaaauaaguccaagacaga

SEQ ID NO: 10580 - RNA, 19 nt, Artificial Sequence
  Synthetic
ccagaaagucacauuaaua

SEQ ID NO: 10581 - RNA, 19 nt, Artificial Sequence
  Synthetic
gcuaguaaacucaaugaaa

SEQ ID NO: 10582 - RNA, 19 nt, Artificial Sequence
  Synthetic
gcaugggacaggaagauaa

SEQ ID NO: 10583 - RNA, 19 nt, Artificial Sequence
  Synthetic
gcaguuugcuuuagaguca

SEQ ID NO: 10584 - RNA, 19 nt, Artificial Sequence
  Synthetic
gaaacaagcguaauaggaa

SEQ ID NO: 10585 - RNA, 19 nt, Artificial Sequence
  Synthetic
gaugaaauccacaguaaau

SEQ ID NO: 10586 - RNA, 19 nt, Artificial Sequence
  Synthetic
cgcugaaagugcugagauu

SEQ ID NO: 10587 - RNA, 19 nt, Artificial Sequence
  Synthetic
uagaugaaauccacaguaa

SEQ ID NO: 10588 - RNA, 19 nt, Artificial Sequence
  Synthetic
ggaaagaugcuaaauucua

SEQ ID NO: 10589 - RNA, 19 nt, Artificial Sequence
  Synthetic
aaacaagcguaauaggaau

SEQ ID NO: 10590 - RNA, 19 nt, Artificial Sequence
  Synthetic
guucagacaucauaagaga

SEQ ID NO: 10591 - RNA, 19 nt, Artificial Sequence
  Synthetic
cgcgaagagaagaaggaaa

SEQ ID NO: 10592 - RNA, 19 nt, Artificial Sequence
  Synthetic
gauaguugaguauggguua

SEQ ID NO: 10593 - RNA, 19 nt, Artificial Sequence
  Synthetic
gcgaagagaagaaggaaag

SEQ ID NO: 10594 - RNA, 19 nt, Artificial Sequence
  Synthetic
gaauuugcuucgaguauuu

SEQ ID NO: 10595 - RNA, 19 nt, Artificial Sequence
  Synthetic
gagauugaaccaagaaaca

SEQ ID NO: 10596 - RNA, 19 nt, Artificial Sequence
  Synthetic
aaggaaagccucagaaguu

SEQ ID NO: 10597 - RNA, 19 nt, Artificial Sequence
  Synthetic
cugaaagugcugagauuga

SEQ ID NO: 10598 - RNA, 19 nt, Artificial Sequence
  Synthetic
gaaauaaacaacagcucau

SEQ ID NO: 10599 - RNA, 19 nt, Artificial Sequence
  Synthetic
ucuucuagcuguauugaua

SEQ ID NO: 10600 - RNA, 19 nt, Artificial Sequence
  Synthetic
gauaauguguggagucuca

SEQ ID NO: 10601 - RNA, 19 nt, Artificial Sequence
  Synthetic
cgagaaagcaagaggcaaa

SEQ ID NO: 10602 - RNA, 19 nt, Artificial Sequence
  Synthetic
ggaugcaguuugugaguua

SEQ ID NO: 10603 - RNA, 19 nt, Artificial Sequence
  Synthetic
ccaaauaccuccagaaguu

SEQ ID NO: 10604 - RNA, 19 nt, Artificial Sequence
  Synthetic
caugaagagcagugaauua

SEQ ID NO: 10605 - RNA, 19 nt, Artificial Sequence
  Synthetic
gcaaggaugucaugaagaa

SEQ ID NO: 10606 - RNA, 19 nt, Artificial Sequence
  Synthetic
aguauagguaugagggaaa

SEQ ID NO: 10607 - RNA, 19 nt, Artificial Sequence
  Synthetic
gcagaagaguuaacauuua

SEQ ID NO: 10608 - RNA, 19 nt, Artificial Sequence
  Synthetic
caguacagcagaagaguua

SEQ ID NO: 10609 - RNA, 19 nt, Artificial Sequence
  Synthetic
caaagaaauuucacgacaa

SEQ ID NO: 10610 - RNA, 19 nt, Artificial Sequence
  Synthetic
cugagaaccuggaacguua

SEQ ID NO: 10611 - RNA, 19 nt, Artificial Sequence
  Synthetic
ggugaaauguccagcaaaa

SEQ ID NO: 10612 - RNA, 19 nt, Artificial Sequence
  Synthetic
ccaggaagcucaugaccaa

SEQ ID NO: 10613 - RNA, 19 nt, Artificial Sequence
  Synthetic
gagugugggucuugcauua

SEQ ID NO: 10614 - RNA, 19 nt, Artificial Sequence
  Synthetic
gcugauugcuugaggcuuu

SEQ ID NO: 10615 - RNA, 19 nt, Artificial Sequence
  Synthetic
ggaagaagaugaaccucaa

SEQ ID NO: 10616 - RNA, 19 nt, Artificial Sequence
  Synthetic
gauaauggcugaugaaaau

SEQ ID NO: 10617 - RNA, 19 nt, Artificial Sequence
  Synthetic
gcacaugaccuugggauua

SEQ ID NO: 10618 - RNA, 19 nt, Artificial Sequence
  Synthetic
uggaagauguccugaaaca

SEQ ID NO: 10619 - RNA, 19 nt, Artificial Sequence
  Synthetic
caaagaagaagguggagau

SEQ ID NO: 10620 - RNA, 19 nt, Artificial Sequence
  Synthetic
gcuaaagagugcccagaau

SEQ ID NO: 10621 - RNA, 19 nt, Artificial Sequence
  Synthetic
gcaaugaggaggucaguuu

SEQ ID NO: 10622 - RNA, 19 nt, Artificial Sequence
  Synthetic
aggccaucaugcagggaaa

SEQ ID NO: 10623 - RNA, 19 nt, Artificial Sequence
  Synthetic
agaaauuggucuugugguu

SEQ ID NO: 10624 - RNA, 19 nt, Artificial Sequence
  Synthetic
cugaugagcuggaggccau

SEQ ID NO: 10625 - RNA, 19 nt, Artificial Sequence
  Synthetic
ugacuaagagcaugauuua

SEQ ID NO: 10626 - RNA, 19 nt, Artificial Sequence
  Synthetic
aggaguagguguuguuauu

SEQ ID NO: 10627 - RNA, 19 nt, Artificial Sequence
  Synthetic
cugaaauuauugagaggga

SEQ ID NO: 10628 - RNA, 19 nt, Artificial Sequence
  Synthetic
gagcaggcauggaauuuua

SEQ ID NO: 10629 - RNA, 19 nt, Artificial Sequence
  Synthetic
ggaaaugagucugguaaca

SEQ ID NO: 10630 - RNA, 19 nt, Artificial Sequence
  Synthetic
ggaucgaugugaaggcaga

SEQ ID NO: 10631 - RNA, 19 nt, Artificial Sequence
  Synthetic
ggacaaaggugcuggagaa

SEQ ID NO: 10632 - RNA, 19 nt, Artificial Sequence
  Synthetic
ggucaaggacuacgagaaa

SEQ ID NO: 10633 - RNA, 19 nt, Artificial Sequence
  Synthetic
ccaagaagcagaucgagaa

SEQ ID NO: 10634 - RNA, 19 nt, Artificial Sequence
  Synthetic
gggcaggaccagaccaaga

SEQ ID NO: 10635 - RNA, 19 nt, Artificial Sequence
  Synthetic
gcuacaaggagaugcugaa

SEQ ID NO: 10636 - RNA, 19 nt, Artificial Sequence
  Synthetic
ucgagaaggcccugcgcua

SEQ ID NO: 10637 - RNA, 19 nt, Artificial Sequence
  Synthetic
acaaggagaugcugaaguu

SEQ ID NO: 10638 - RNA, 19 nt, Artificial Sequence
  Synthetic
gggcgcacguugugagguu

SEQ ID NO: 10639 - RNA, 19 nt, Artificial Sequence
  Synthetic
ugucaacaacuauggcaaa

SEQ ID NO: 10640 - RNA, 19 nt, Artificial Sequence
  Synthetic
aguccauaggcgagaagaa

SEQ ID NO: 10641 - RNA, 19 nt, Artificial Sequence
  Synthetic
aggucaaggacuacgagaa

SEQ ID NO: 10642 - RNA, 19 nt, Artificial Sequence
  Synthetic
gcuucuaugcccaggucaa

SEQ ID NO: 10643 - RNA, 19 nt, Artificial Sequence
  Synthetic
uggaggagacggagcucua

SEQ ID NO: 10644 - RNA, 19 nt, Artificial Sequence
  Synthetic
augcccaggucaaggacua

SEQ ID NO: 10645 - RNA, 19 nt, Artificial Sequence
  Synthetic
cgagaagcugugcgaguuu

SEQ ID NO: 10646 - RNA, 19 nt, Artificial Sequence
  Synthetic
gcgcgcacguugugagguu

SEQ ID NO: 10647 - RNA, 19 nt, Artificial Sequence
  Synthetic
gagcauuuaccgcagcaaa

SEQ ID NO: 10648 - RNA, 19 nt, Artificial Sequence
  Synthetic
gcauugcagguguggacaa

SEQ ID NO: 10649 - RNA, 19 nt, Artificial Sequence
  Synthetic
guacuuugcucuuuauaga

SEQ ID NO: 10650 - RNA, 19 nt, Artificial Sequence
  Synthetic
ugugaggagucuaugaaga

SEQ ID NO: 10651 - RNA, 19 nt, Artificial Sequence
  Synthetic
gugaggagucuaugaagau

SEQ ID NO: 10652 - RNA, 19 nt, Artificial Sequence
  Synthetic
ugucugagcgagagcauuu

SEQ ID NO: 10653 - RNA, 19 nt, Artificial Sequence
  Synthetic
agaaggcccuggagagcuu

SEQ ID NO: 10654 - RNA, 19 nt, Artificial Sequence
  Synthetic
cugcacugucugagcgaga

SEQ ID NO: 10655 - RNA, 19 nt, Artificial Sequence
  Synthetic
gagaagagcucggaccuca

SEQ ID NO: 10656 - RNA, 19 nt, Artificial Sequence
  Synthetic
caaaggugcuggagaagag

SEQ ID NO: 10657 - RNA, 19 nt, Artificial Sequence
  Synthetic
cauugcagguguggacaaa

SEQ ID NO: 10658 - RNA, 19 nt, Artificial Sequence
  Synthetic
gcaacgagaagcugugcga

SEQ ID NO: 10659 - RNA, 19 nt, Artificial Sequence
  Synthetic
ccaagcagcagaucgagaa

SEQ ID NO: 10660 - RNA, 19 nt, Artificial Sequence
  Synthetic
gcgcuaugcccacaacaau

SEQ ID NO: 10661 - RNA, 19 nt, Artificial Sequence
  Synthetic
caagaagccuaaugagaaa

SEQ ID NO: 10662 - RNA, 19 nt, Artificial Sequence
  Synthetic
ucauagaagucgaaacaua

SEQ ID NO: 10663 - RNA, 19 nt, Artificial Sequence
  Synthetic
gggaagaauucuauagaga

SEQ ID NO: 10664 - RNA, 19 nt, Artificial Sequence
  Synthetic
cuaaggaauugauggaaua

SEQ ID NO: 10665 - RNA, 19 nt, Artificial Sequence
  Synthetic
ggaaacagaacgugaauau

SEQ ID NO: 10666 - RNA, 19 nt, Artificial Sequence
  Synthetic
gcuaaggaauugauggaau

SEQ ID NO: 10667 - RNA, 19 nt, Artificial Sequence
  Synthetic
gguaaaggaaauaagcaua

SEQ ID NO: 10668 - RNA, 19 nt, Artificial Sequence
  Synthetic
gacaagagagaaagggaua

SEQ ID NO: 10669 - RNA, 19 nt, Artificial Sequence
  Synthetic
ccacuuaacaucaggaauu

SEQ ID NO: 10670 - RNA, 19 nt, Artificial Sequence
  Synthetic
ggaaauaagcauaagaaac

SEQ ID NO: 10671 - RNA, 19 nt, Artificial Sequence
  Synthetic
caaaagagaaggagaguga

SEQ ID NO: 10672 - RNA, 19 nt, Artificial Sequence
  Synthetic
gagaaagggauaaaccaaa

SEQ ID NO: 10673 - RNA, 19 nt, Artificial Sequence
  Synthetic
ccaagaagccuaaugagaa

SEQ ID NO: 10674 - RNA, 19 nt, Artificial Sequence
  Synthetic
ugguaaaccuggacauuau

SEQ ID NO: 10675 - RNA, 19 nt, Artificial Sequence
  Synthetic
uguuauaagucgaacugaa

SEQ ID NO: 10676 - RNA, 19 nt, Artificial Sequence
  Synthetic
cgaaagaagaauauacuga

SEQ ID NO: 10677 - RNA, 19 nt, Artificial Sequence
  Synthetic
gcaauugggaagaaagaga

SEQ ID NO: 10678 - RNA, 19 nt, Artificial Sequence
  Synthetic
gguagcaacuauccagaaa

SEQ ID NO: 10679 - RNA, 19 nt, Artificial Sequence
  Synthetic
gcaaauagagagaacuuuu

SEQ ID NO: 10680 - RNA, 19 nt, Artificial Sequence
  Synthetic
cagaaaagcuaacaacuaa

SEQ ID NO: 10681 - RNA, 19 nt, Artificial Sequence
  Synthetic
gggacagucuccuaauaaa

SEQ ID NO: 10682 - RNA, 19 nt, Artificial Sequence
  Synthetic
caagagagaaagggauaaa

SEQ ID NO: 10683 - RNA, 19 nt, Artificial Sequence
  Synthetic
uauagagagugguaugaaa

SEQ ID NO: 10684 - RNA, 19 nt, Artificial Sequence
  Synthetic
gcaaggauauuaugacuga

SEQ ID NO: 10685 - RNA, 19 nt, Artificial Sequence
  Synthetic
ccaaagaugucaaaucaga

SEQ ID NO: 10686 - RNA, 19 nt, Artificial Sequence
  Synthetic
gagaggagcugcuacagaa

SEQ ID NO: 10687 - RNA, 19 nt, Artificial Sequence
  Synthetic
gcuaacaacuaaggaagaa

SEQ ID NO: 10688 - RNA, 19 nt, Artificial Sequence
  Synthetic
ggagaugguaaaggaaaua

SEQ ID NO: 10689 - RNA, 19 nt, Artificial Sequence
  Synthetic
aaaccaaacggaagaauga

SEQ ID NO: 10690 - RNA, 19 nt, Artificial Sequence
  Synthetic
gucuagaucucauggauau

SEQ ID NO: 10691 - RNA, 19 nt, Artificial Sequence
  Synthetic
gggauauugugguugauaa

SEQ ID NO: 10692 - RNA, 19 nt, Artificial Sequence
  Synthetic
gcauagaaugucaagcuaa

SEQ ID NO: 10693 - RNA, 19 nt, Artificial Sequence
  Synthetic
ccaucaagcuuaauuguuu

SEQ ID NO: 10694 - RNA, 19 nt, Artificial Sequence
  Synthetic
gcuguuaccuaauuacaaa

SEQ ID NO: 10695 - RNA, 19 nt, Artificial Sequence
  Synthetic
gacaacagagagugggaau

SEQ ID NO: 10696 - RNA, 19 nt, Artificial Sequence
  Synthetic
gcaagaagcgcuuugaagu

SEQ ID NO: 10697 - RNA, 19 nt, Artificial Sequence
  Synthetic
ggauauugugguugauaac

SEQ ID NO: 10698 - RNA, 19 nt, Artificial Sequence
  Synthetic
ccugggauauugugguuga

SEQ ID NO: 10699 - RNA, 19 nt, Artificial Sequence
  Synthetic
ccauuggacaacagagagu

SEQ ID NO: 10700 - RNA, 19 nt, Artificial Sequence
  Synthetic
cauagaaugucaagcuaac

SEQ ID NO: 10701 - RNA, 19 nt, Artificial Sequence
  Synthetic
gaagcgcuuugaagugaaa

SEQ ID NO: 10702 - RNA, 19 nt, Artificial Sequence
  Synthetic
ggaaccacauuauggaucu

SEQ ID NO: 10703 - RNA, 19 nt, Artificial Sequence
  Synthetic
gggcaagaagcgcuuugaa

SEQ ID NO: 10704 - RNA, 19 nt, Artificial Sequence
  Synthetic
cauauuguauucuguguca

SEQ ID NO: 10705 - RNA, 19 nt, Artificial Sequence
  Synthetic
cuucuuccaucaagcuuaa

SEQ ID NO: 10706 - RNA, 19 nt, Artificial Sequence
  Synthetic
caacagagagugggaauuc

SEQ ID NO: 10707 - RNA, 19 nt, Artificial Sequence
  Synthetic
ugucaaauaaaguccaguu

SEQ ID NO: 10708 - RNA, 19 nt, Artificial Sequence
  Synthetic
agaagcgcuuugaagugaa

SEQ ID NO: 10709 - RNA, 19 nt, Artificial Sequence
  Synthetic
ugcauagaaugucaagcua

SEQ ID NO: 10710 - RNA, 19 nt, Artificial Sequence
  Synthetic
ccucugggccugggauauu

SEQ ID NO: 10711 - RNA, 19 nt, Artificial Sequence
  Synthetic
ggccugggauauugugguu

SEQ ID NO: 10712 - RNA, 19 nt, Artificial Sequence
  Synthetic
aagaagcgcuuugaaguga

SEQ ID NO: 10713 - RNA, 19 nt, Artificial Sequence
  Synthetic
caagaagcgcuuugaagug

SEQ ID NO: 10714 - RNA, 19 nt, Artificial Sequence
  Synthetic
gcagcgauggauguggaua

SEQ ID NO: 10715 - RNA, 19 nt, Artificial Sequence
  Synthetic
ggcaagaagcgcuuugaag

SEQ ID NO: 10716 - RNA, 19 nt, Artificial Sequence
  Synthetic
gcaggaaccacauuaugga

SEQ ID NO: 10717 - RNA, 19 nt, Artificial Sequence
  Synthetic
ucaguuugcuguuucugua

SEQ ID NO: 10718 - RNA, 19 nt, Artificial Sequence
  Synthetic
gaaccacauuauggaucuu

SEQ ID NO: 10719 - RNA, 19 nt, Artificial Sequence
  Synthetic
guugauaacugugccaucu

SEQ ID NO: 10720 - RNA, 19 nt, Artificial Sequence
  Synthetic
uaaccaugcuuuucacuuc

SEQ ID NO: 10721 - RNA, 19 nt, Artificial Sequence
  Synthetic
cuguggaauuuguaggauu

SEQ ID NO: 10722 - RNA, 19 nt, Artificial Sequence
  Synthetic
cugugaaaacuguggaauu

SEQ ID NO: 10723 - RNA, 19 nt, Artificial Sequence
  Synthetic
gcacagacuccuaugccau

SEQ ID NO: 10724 - RNA, 19 nt, Artificial Sequence
  Synthetic
aaauguugaaagaaggcua

SEQ ID NO: 10725 - RNA, 19 nt, Artificial Sequence
  Synthetic
gccacaaggagauggauaa

SEQ ID NO: 10726 - RNA, 19 nt, Artificial Sequence
  Synthetic
ggaguagcccagagcaauu

SEQ ID NO: 10727 - RNA, 19 nt, Artificial Sequence
  Synthetic
cuauuaagccagacacaga

SEQ ID NO: 10728 - RNA, 19 nt, Artificial Sequence
  Synthetic
uggaugaccucgaugauga

SEQ ID NO: 10729 - RNA, 19 nt, Artificial Sequence
  Synthetic
acaaggagauggauaaugu

SEQ ID NO: 10730 - RNA, 19 nt, Artificial Sequence
  Synthetic
ccgcauagccucaccucuu

SEQ ID NO: 10731 - RNA, 19 nt, Artificial Sequence
  Synthetic
ggacaaggaagacucucaa

SEQ ID NO: 10732 - RNA, 19 nt, Artificial Sequence
  Synthetic
ggauaaagaguauggauaa

SEQ ID NO: 10733 - RNA, 19 nt, Artificial Sequence
  Synthetic
ggacaauauuccagggauu

SEQ ID NO: 10734 - RNA, 19 nt, Artificial Sequence
  Synthetic
acacaucgcuggagggaua

SEQ ID NO: 10735 - RNA, 19 nt, Artificial Sequence
  Synthetic
gggauaaagaguauggaua

SEQ ID NO: 10736 - RNA, 19 nt, Artificial Sequence
  Synthetic
ggagaaaauccaagaauua

SEQ ID NO: 10737 - RNA, 19 nt, Artificial Sequence
  Synthetic
cuaaagcaguucacagaaa

SEQ ID NO: 10738 - RNA, 19 nt, Artificial Sequence
  Synthetic
gggaauugaccaugcuuaa

SEQ ID NO: 10739 - RNA, 19 nt, Artificial Sequence
  Synthetic
agguagaggugggagauaa

SEQ ID NO: 10740 - RNA, 19 nt, Artificial Sequence
  Synthetic
ggaacaggcacgagcugaa

SEQ ID NO: 10741 - RNA, 19 nt, Artificial Sequence
  Synthetic
agucagauauggagaaaau

SEQ ID NO: 10742 - RNA, 19 nt, Artificial Sequence
  Synthetic
cuggagggauaaagaguau

SEQ ID NO: 10743 - RNA, 19 nt, Artificial Sequence
  Synthetic
uaagagaggcucaguuaua

SEQ ID NO: 10744 - RNA, 19 nt, Artificial Sequence
  Synthetic
ucaagacauccuagaaaua

SEQ ID NO: 10745 - RNA, 19 nt, Artificial Sequence
  Synthetic
gggcagugucuuuguggua

SEQ ID NO: 10746 - RNA, 19 nt, Artificial Sequence
  Synthetic
ccaaugugccauaguuuua

SEQ ID NO: 10747 - RNA, 19 nt, Artificial Sequence
  Synthetic
ccaccucuguuaugagaua

SEQ ID NO: 10748 - RNA, 19 nt, Artificial Sequence
  Synthetic
gcugaacucuugagccuaa

SEQ ID NO: 10749 - RNA, 19 nt, Artificial Sequence
  Synthetic
cuuaaaggagcaugaguau

SEQ ID NO: 10750 - RNA, 19 nt, Artificial Sequence
  Synthetic
gaagauuguuugggaguuu

SEQ ID NO: 10751 - RNA, 19 nt, Artificial Sequence
  Synthetic
cuaacaaccuagacuggaa

SEQ ID NO: 10752 - RNA, 19 nt, Artificial Sequence
  Synthetic
guaaugagauguaucaaga

SEQ ID NO: 10753 - RNA, 19 nt, Artificial Sequence
  Synthetic
ggcaagugcgguacaguua

SEQ ID NO: 10754 - RNA, 19 nt, Artificial Sequence
  Synthetic
gagcugaacucuugagccu

SEQ ID NO: 10755 - RNA, 19 nt, Artificial Sequence
  Synthetic
gcagucagauauggagaaa

SEQ ID NO: 10756 - RNA, 19 nt, Artificial Sequence
  Synthetic
gggagaagauuguuuggga

SEQ ID NO: 10757 - RNA, 19 nt, Artificial Sequence
  Synthetic
auuaagagaggcucaguua

SEQ ID NO: 10758 - RNA, 19 nt, Artificial Sequence
  Synthetic
gagaagauuguuugggagu

SEQ ID NO: 10759 - RNA, 19 nt, Artificial Sequence
  Synthetic
agauggagagggagaagau

SEQ ID NO: 10760 - RNA, 19 nt, Artificial Sequence
  Synthetic
gccauuggaucaugagaca

SEQ ID NO: 10761 - RNA, 19 nt, Artificial Sequence
  Synthetic
uaucaagacauccuagaaa

SEQ ID NO: 10762 - RNA, 19 nt, Artificial Sequence
  Synthetic
cagauaaagugaaggaauu

SEQ ID NO: 10763 - RNA, 19 nt, Artificial Sequence
  Synthetic
gaaacuaguaagaggaaau

SEQ ID NO: 10764 - RNA, 19 nt, Artificial Sequence
  Synthetic
gcaggaguuuagagagaaa

SEQ ID NO: 10765 - RNA, 19 nt, Artificial Sequence
  Synthetic
uggcagaauuugugugcaa

SEQ ID NO: 10766 - RNA, 19 nt, Artificial Sequence
  Synthetic
gaggaaaucccuacaguua

SEQ ID NO: 10767 - RNA, 19 nt, Artificial Sequence
  Synthetic
gaacaauguggcagaauuu

SEQ ID NO: 10768 - RNA, 19 nt, Artificial Sequence
  Synthetic
augcaggaguuuagagaga

SEQ ID NO: 10769 - RNA, 19 nt, Artificial Sequence
  Synthetic
ccugaaggguauuguggaa

SEQ ID NO: 10770 - RNA, 19 nt, Artificial Sequence
  Synthetic
auuaauagccugcagguua

SEQ ID NO: 10771 - RNA, 19 nt, Artificial Sequence
  Synthetic
cauaugacccagagaucaa

SEQ ID NO: 10772 - RNA, 19 nt, Artificial Sequence
  Synthetic
agacagaggaugugaugga

SEQ ID NO: 10773 - RNA, 19 nt, Artificial Sequence
  Synthetic
ccaugaaacuugcuguuau

SEQ ID NO: 10774 - RNA, 19 nt, Artificial Sequence
  Synthetic
ggaaacuaguaagaggaaa

SEQ ID NO: 10775 - RNA, 19 nt, Artificial Sequence
  Synthetic
ucagauaaagugaaggaau

SEQ ID NO: 10776 - RNA, 19 nt, Artificial Sequence
  Synthetic
ugaacaauguggcagaauu

SEQ ID NO: 10777 - RNA, 19 nt, Artificial Sequence
  Synthetic
ucaaaguaaucaaggaaac

SEQ ID NO: 10778 - RNA, 19 nt, Artificial Sequence
  Synthetic
ccaaaaugccaguaugcaa

SEQ ID NO: 10779 - RNA, 19 nt, Artificial Sequence
  Synthetic
guggaaaaguauaacaaga

SEQ ID NO: 10780 - RNA, 19 nt, Artificial Sequence
  Synthetic
cuuuggugguacugaacaa

SEQ ID NO: 10781 - RNA, 19 nt, Artificial Sequence
  Synthetic
guuacugacuaaagauuca

SEQ ID NO: 10782 - RNA, 19 nt, Artificial Sequence
  Synthetic
ugaaggguauuguggaaaa

SEQ ID NO: 10783 - RNA, 19 nt, Artificial Sequence
  Synthetic
cggaauuccuuguggagac

SEQ ID NO: 10784 - RNA, 19 nt, Artificial Sequence
  Synthetic
caacagaugcaggaguuua

SEQ ID NO: 10785 - RNA, 19 nt, Artificial Sequence
  Synthetic
gaagggagugugcggaauu

SEQ ID NO: 10786 - RNA, 19 nt, Artificial Sequence
  Synthetic
ugauggagcugcuugaaga

SEQ ID NO: 10787 - RNA, 19 nt, Artificial Sequence
  Synthetic
ugucagaacccauuguauu

SEQ ID NO: 10788 - RNA, 19 nt, Artificial Sequence
  Synthetic
uagaagggagugugcggaa

SEQ ID NO: 10789 - RNA, 19 nt, Artificial Sequence
  Synthetic
ucaacaaacucaacaccau

SEQ ID NO: 10790 - RNA, 19 nt, Artificial Sequence
  Synthetic
aacuagucgauguggauaa

SEQ ID NO: 10791 - RNA, 19 nt, Artificial Sequence
  Synthetic
ccauuguauuucugcaaca

SEQ ID NO: 10792 - RNA, 19 nt, Artificial Sequence
  Synthetic
auacaaagucauaggagaa

SEQ ID NO: 10793 - RNA, 19 nt, Artificial Sequence
  Synthetic
gggaugugcuugaguguuu

SEQ ID NO: 10794 - RNA, 19 nt, Artificial Sequence
  Synthetic
gguaaaagcguuauacaaa

SEQ ID NO: 10795 - RNA, 19 nt, Artificial Sequence
  Synthetic
ucaaggaacuggagcccaa

SEQ ID NO: 10796 - RNA, 19 nt, Artificial Sequence
  Synthetic
agugaugauucgugacuuu

SEQ ID NO: 10797 - RNA, 19 nt, Artificial Sequence
  Synthetic
cagaaugggaccugggagu

SEQ ID NO: 10798 - RNA, 19 nt, Artificial Sequence
  Synthetic
gauucuggacugugaguuu

SEQ ID NO: 10799 - RNA, 19 nt, Artificial Sequence
  Synthetic
cuucguagaccgcaaguua

SEQ ID NO: 10800 - RNA, 19 nt, Artificial Sequence
  Synthetic
gcucagacuaucuagagaa

SEQ ID NO: 10801 - RNA, 19 nt, Artificial Sequence
  Synthetic
cugggagucugcagagaau

SEQ ID NO: 10802 - RNA, 19 nt, Artificial Sequence
  Synthetic
gcaucaauucacugcagaa

SEQ ID NO: 10803 - RNA, 19 nt, Artificial Sequence
  Synthetic
agcccaagcugaagaagau

SEQ ID NO: 10804 - RNA, 19 nt, Artificial Sequence
  Synthetic
cucagacuaucuagagaaa

SEQ ID NO: 10805 - RNA, 19 nt, Artificial Sequence
  Synthetic
gagaaucuguucaccgcaa

SEQ ID NO: 10806 - RNA, 19 nt, Artificial Sequence
  Synthetic
gagcccaagcugaagaaga

SEQ ID NO: 10807 - RNA, 19 nt, Artificial Sequence
  Synthetic
ggaacgcucuacucgguaa

SEQ ID NO: 10808 - RNA, 19 nt, Artificial Sequence
  Synthetic
ugggacaauucaugauuau

SEQ ID NO: 10809 - RNA, 19 nt, Artificial Sequence
  Synthetic
caauagaacuucaaaucuc

SEQ ID NO: 10810 - RNA, 19 nt, Artificial Sequence
  Synthetic
ccauggucucucagaagaa

SEQ ID NO: 10811 - RNA, 19 nt, Artificial Sequence
  Synthetic
gaacaagcacagaauggga

SEQ ID NO: 10812 - RNA, 19 nt, Artificial Sequence
  Synthetic
acugugaguuugagggaug

SEQ ID NO: 10813 - RNA, 19 nt, Artificial Sequence
  Synthetic
ggacgugggaacaagcaca

SEQ ID NO: 10814 - RNA, 19 nt, Artificial Sequence
  Synthetic
ggacugugaguuugaggga

SEQ ID NO: 10815 - RNA, 19 nt, Artificial Sequence
  Synthetic
cagacuaucuagagaaacc

SEQ ID NO: 10816 - RNA, 19 nt, Artificial Sequence
  Synthetic
cauugagucuuaugguuca

SEQ ID NO: 10817 - RNA, 19 nt, Artificial Sequence
  Synthetic
ggacaauucaugauuauac

SEQ ID NO: 10818 - RNA, 19 nt, Artificial Sequence
  Synthetic
cuacuuugcuguugcuguu

SEQ ID NO: 10819 - RNA, 19 nt, Artificial Sequence
  Synthetic
ucaauucacugcagaagga

SEQ ID NO: 10820 - RNA, 19 nt, Artificial Sequence
  Synthetic
gugacuuucuuucccaaua

SEQ ID NO: 10821 - RNA, 19 nt, Artificial Sequence
  Synthetic
guucacaucuuguuuccua

SEQ ID NO: 10822 - RNA, 19 nt, Artificial Sequence
  Synthetic
ugacaaagcuggaacacaa

SEQ ID NO: 10823 - RNA, 19 nt, Artificial Sequence
  Synthetic
gcauuaauucacugcagaa

SEQ ID NO: 10824 - RNA, 19 nt, Artificial Sequence
  Synthetic
cuauagaaauguccuguau

SEQ ID NO: 10825 - RNA, 19 nt, Artificial Sequence
  Synthetic
ggacauuucuugauuauac

SEQ ID NO: 10826 - RNA, 19 nt, Artificial Sequence
  Synthetic
caucagacagaaucggcaa

SEQ ID NO: 10827 - RNA, 19 nt, Artificial Sequence
  Synthetic
gauuauagaguccuaagua

SEQ ID NO: 10828 - RNA, 19 nt, Artificial Sequence
  Synthetic
ugggacauuucuugauuau

SEQ ID NO: 10829 - RNA, 19 nt, Artificial Sequence
  Synthetic
acacaauaccucuaugcau

SEQ ID NO: 10830 - RNA, 19 nt, Artificial Sequence
  Synthetic
ccucaagugcauuaauuca

SEQ ID NO: 10831 - RNA, 19 nt, Artificial Sequence
  Synthetic
ggaacgcucuacuucguaa

SEQ ID NO: 10832 - RNA, 19 nt, Artificial Sequence
  Synthetic
gggaacaagcacagaaugg

SEQ ID NO: 10833 - RNA, 19 nt, Artificial Sequence
  Synthetic
auagaaauguccuguauuc

SEQ ID NO: 10834 - RNA, 19 nt, Artificial Sequence
  Synthetic
ggacauggcugcacucuuc

SEQ ID NO: 10835 - RNA, 19 nt, Artificial Sequence
  Synthetic
auucgugacuuucccaaua

SEQ ID NO: 10836 - RNA, 19 nt, Artificial Sequence
  Synthetic
agucauaggagaaagauau

SEQ ID NO: 10837 - RNA, 19 nt, Artificial Sequence
  Synthetic
ggaauuuucuacuugguaa

SEQ ID NO: 10838 - RNA, 19 nt, Artificial Sequence
  Synthetic
ggagaaagauaugggacau

SEQ ID NO: 10839 - RNA, 19 nt, Artificial Sequence
  Synthetic
guggguagacuuaggaauu

SEQ ID NO: 10840 - RNA, 19 nt, Artificial Sequence
  Synthetic
cuuaguagaccgcaaguua

SEQ ID NO: 10841 - RNA, 19 nt, Artificial Sequence
  Synthetic
gagaaagauaugggacauu

SEQ ID NO: 10842 - RNA, 19 nt, Artificial Sequence
  Synthetic
gcaucaauucgcugcagaa

SEQ ID NO: 10843 - RNA, 19 nt, Artificial Sequence
  Synthetic
aaacagggucagaaaauua

SEQ ID NO: 10844 - RNA, 19 nt, Artificial Sequence
  Synthetic
gagaaucuguucacugcaa

SEQ ID NO: 10845 - RNA, 19 nt, Artificial Sequence
  Synthetic
gggaagauccagcugacca

SEQ ID NO: 10846 - RNA, 19 nt, Artificial Sequence
  Synthetic
agaaagauaugggacauuu

SEQ ID NO: 10847 - RNA, 19 nt, Artificial Sequence
  Synthetic
gauaugggacauuucuaua

SEQ ID NO: 10848 - RNA, 19 nt, Artificial Sequence
  Synthetic
guucuguauucucggauca

SEQ ID NO: 10849 - RNA, 19 nt, Artificial Sequence
  Synthetic
gcacugagcugaaguugaa

SEQ ID NO: 10850 - RNA, 19 nt, Artificial Sequence
  Synthetic
ggaugaaccuggaggccca

SEQ ID NO: 10851 - RNA, 19 nt, Artificial Sequence
  Synthetic
gcagagaacuuaggagaga

SEQ ID NO: 10852 - RNA, 19 nt, Artificial Sequence
  Synthetic
ugaccgugguggugaacaa

SEQ ID NO: 10853 - RNA, 19 nt, Artificial Sequence
  Synthetic
gcucauucccaauaaauua

SEQ ID NO: 10854 - RNA, 19 nt, Artificial Sequence
  Synthetic
agaagacacuggagggcca

SEQ ID NO: 10855 - RNA, 19 nt, Artificial Sequence
  Synthetic
cgauagaggagaccaguca

SEQ ID NO: 10856 - RNA, 19 nt, Artificial Sequence
  Synthetic
ggagaagaucgaccagcua

SEQ ID NO: 10857 - RNA, 19 nt, Artificial Sequence
  Synthetic
aauaaaugcuccacagacu

SEQ ID NO: 10858 - RNA, 19 nt, Artificial Sequence
  Synthetic
ccaucaaggucugggacau

SEQ ID NO: 10859 - RNA, 19 nt, Artificial Sequence
  Synthetic
aaagggagggcgagaauga

SEQ ID NO: 10860 - RNA, 19 nt, Artificial Sequence
  Synthetic
acuccauugcugugacaaa

SEQ ID NO: 10861 - RNA, 19 nt, Artificial Sequence
  Synthetic
caaucaagaucugggacau

SEQ ID NO: 10862 - RNA, 19 nt, Artificial Sequence
  Synthetic
gcgucuacuccauggguga

SEQ ID NO: 10863 - RNA, 19 nt, Artificial Sequence
  Synthetic
gggucuggaguauggacaa

SEQ ID NO: 10864 - RNA, 19 nt, Artificial Sequence
  Synthetic
gaaaagggagggcgagaau

SEQ ID NO: 10865 - RNA, 19 nt, Artificial Sequence
  Synthetic
gguaaaugguuuucuauag

SEQ ID NO: 10866 - RNA, 19 nt, Artificial Sequence
  Synthetic
acagggaccagaauggaaa

SEQ ID NO: 10867 - RNA, 19 nt, Artificial Sequence
  Synthetic
gggcacacguucuguagga

SEQ ID NO: 10868 - RNA, 19 nt, Artificial Sequence
  Synthetic
cccagaaggaccaggagau

SEQ ID NO: 10869 - RNA, 19 nt, Artificial Sequence
  Synthetic
ggcacaaccucgaguucuu

SEQ ID NO: 10870 - RNA, 19 nt, Artificial Sequence
  Synthetic
acaaucaagaucugggaca

SEQ ID NO: 10871 - RNA, 19 nt, Artificial Sequence
  Synthetic
cagagaacuuaggagagaa

SEQ ID NO: 10872 - RNA, 19 nt, Artificial Sequence
  Synthetic
gcaccaucauuguguggga

SEQ ID NO: 10873 - RNA, 19 nt, Artificial Sequence
  Synthetic
cagcagaucuucaagugca

SEQ ID NO: 10874 - RNA, 19 nt, Artificial Sequence
  Synthetic
ccuccugguugaaauaaau

SEQ ID NO: 10875 - RNA, 19 nt, Artificial Sequence
  Synthetic
ugaaggaguuucugcagca

SEQ ID NO: 10876 - RNA, 19 nt, Artificial Sequence
  Synthetic
agcugaaguugaagaagga

SEQ ID NO: 10877 - RNA, 19 nt, Artificial Sequence
  Synthetic
gcacacguucuguaggaga

SEQ ID NO: 10878 - RNA, 19 nt, Artificial Sequence
  Synthetic
gaaauaaaugcuccacaga

SEQ ID NO: 10879 - RNA, 19 nt, Artificial Sequence
  Synthetic
gaaagaagcugguguccaa

SEQ ID NO: 10880 - RNA, 19 nt, Artificial Sequence
  Synthetic
gccaauaagaggacacaaa

SEQ ID NO: 10881 - RNA, 19 nt, Artificial Sequence
  Synthetic
uauacgagguguuggagaa

SEQ ID NO: 10882 - RNA, 19 nt, Artificial Sequence
  Synthetic
agagccagguggagaaauu

SEQ ID NO: 10883 - RNA, 19 nt, Artificial Sequence
  Synthetic
ccaucaagaccgagugcuu

SEQ ID NO: 10884 - RNA, 19 nt, Artificial Sequence
  Synthetic
ggagcuggugaaugagaaa

SEQ ID NO: 10885 - RNA, 19 nt, Artificial Sequence
  Synthetic
gaucagaccacaacgauga

SEQ ID NO: 10886 - RNA, 19 nt, Artificial Sequence
  Synthetic
cccuggagcuggugaauga

SEQ ID NO: 10887 - RNA, 19 nt, Artificial Sequence
  Synthetic
ugugaagacaacugggaau

SEQ ID NO: 10888 - RNA, 19 nt, Artificial Sequence
  Synthetic
cuggacaugcugaagaaua

SEQ ID NO: 10889 - RNA, 19 nt, Artificial Sequence
  Synthetic
gggagaaggggauggagaa

SEQ ID NO: 10890 - RNA, 19 nt, Artificial Sequence
  Synthetic
gggaggaauacgaggccca

SEQ ID NO: 10891 - RNA, 19 nt, Artificial Sequence
  Synthetic
cggaggaccugaugggugu

SEQ ID NO: 10892 - RNA, 19 nt, Artificial Sequence
  Synthetic
cuggagggcgucagugaaa

SEQ ID NO: 10893 - RNA, 19 nt, Artificial Sequence
  Synthetic
caacaacaaacgugcuuuu

SEQ ID NO: 10894 - RNA, 19 nt, Artificial Sequence
  Synthetic
gcauugagcuccagcauug

SEQ ID NO: 10895 - RNA, 19 nt, Artificial Sequence
  Synthetic
caccaaggauccaaaguga

SEQ ID NO: 10896 - RNA, 19 nt, Artificial Sequence
  Synthetic
cugaagaauacgaugacca

SEQ ID NO: 10897 - RNA, 19 nt, Artificial Sequence
  Synthetic
ggggagcaguguagggaca

SEQ ID NO: 10898 - RNA, 19 nt, Artificial Sequence
  Synthetic
acacguggcuuuuauacaa

SEQ ID NO: 10899 - RNA, 19 nt, Artificial Sequence
  Synthetic
ggagaauacugccagacga

SEQ ID NO: 10900 - RNA, 19 nt, Artificial Sequence
  Synthetic
aauaagaggacacaaauga

SEQ ID NO: 10901 - RNA, 19 nt, Artificial Sequence
  Synthetic
gccuggacaugcugaagaa

SEQ ID NO: 10902 - RNA, 19 nt, Artificial Sequence
  Synthetic
cugcauugucacagcccua

SEQ ID NO: 10903 - RNA, 19 nt, Artificial Sequence
  Synthetic
uguccuaccugccgaaaga

SEQ ID NO: 10904 - RNA, 19 nt, Artificial Sequence
  Synthetic
uggacaugcugaagaauac

SEQ ID NO: 10905 - RNA, 19 nt, Artificial Sequence
  Synthetic
cgagguaugugaagacaac

SEQ ID NO: 10906 - RNA, 19 nt, Artificial Sequence
  Synthetic
cagcaggcauugagcucca

SEQ ID NO: 10907 - RNA, 19 nt, Artificial Sequence
  Synthetic
cagcccagccagccaauaa

SEQ ID NO: 10908 - RNA, 19 nt, Artificial Sequence
  Synthetic
gugaaaagcaguacaccau

SEQ ID NO: 10909 - RNA, 19 nt, Artificial Sequence
  Synthetic
agagaaaggaggaaagaaa

SEQ ID NO: 10910 - RNA, 19 nt, Artificial Sequence
  Synthetic
ggauugagauagaggagaa

SEQ ID NO: 10911 - RNA, 19 nt, Artificial Sequence
  Synthetic
gagaagacguggaguaaau

SEQ ID NO: 10912 - RNA, 19 nt, Artificial Sequence
  Synthetic
agaacaagaaacagggcaa

SEQ ID NO: 10913 - RNA, 19 nt, Artificial Sequence
  Synthetic
ggacauaagccuuuuaaca

SEQ ID NO: 10914 - RNA, 19 nt, Artificial Sequence
  Synthetic
gggcagcagcaaagggcaa

SEQ ID NO: 10915 - RNA, 19 nt, Artificial Sequence
  Synthetic
agugagaagacguggagua

SEQ ID NO: 10916 - RNA, 19 nt, Artificial Sequence
  Synthetic
uggaagacgagaugaggua

SEQ ID NO: 10917 - RNA, 19 nt, Artificial Sequence
  Synthetic
agauagaggagaacaagaa

SEQ ID NO: 10918 - RNA, 19 nt, Artificial Sequence
  Synthetic
cagccaagcuauugaagca

SEQ ID NO: 10919 - RNA, 19 nt, Artificial Sequence
  Synthetic
gagaagccaaggaaggaaa

SEQ ID NO: 10920 - RNA, 19 nt, Artificial Sequence
  Synthetic
ccaaauggaugaauguaga

SEQ ID NO: 10921 - RNA, 19 nt, Artificial Sequence
  Synthetic
ggaagggugugcuggagua

SEQ ID NO: 10922 - RNA, 19 nt, Artificial Sequence
  Synthetic
ggaguuagcagaugacaau

SEQ ID NO: 10923 - RNA, 19 nt, Artificial Sequence
  Synthetic
gugagaagacguggaguaa

SEQ ID NO: 10924 - RNA, 19 nt, Artificial Sequence
  Synthetic
caaaacugcuccaaagaaa

SEQ ID NO: 10925 - RNA, 19 nt, Artificial Sequence
  Synthetic
cggaagauggacagcauau

SEQ ID NO: 10926 - RNA, 19 nt, Artificial Sequence
  Synthetic
cagcugaugaagagggaga

SEQ ID NO: 10927 - RNA, 19 nt, Artificial Sequence
  Synthetic
agucuaaacccaagagcga

SEQ ID NO: 10928 - RNA, 19 nt, Artificial Sequence
  Synthetic
aaagaaggcucgggaggaa

SEQ ID NO: 10929 - RNA, 19 nt, Artificial Sequence
  Synthetic
gagaaaggaggaaagaaaa

SEQ ID NO: 10930 - RNA, 19 nt, Artificial Sequence
  Synthetic
cugaagagaaaggaggaaa

SEQ ID NO: 10931 - RNA, 19 nt, Artificial Sequence
  Synthetic
ccacagagucacaucagua

SEQ ID NO: 10932 - RNA, 19 nt, Artificial Sequence
  Synthetic
ggacaugguagcuggggaa

SEQ ID NO: 10933 - RNA, 19 nt, Artificial Sequence
  Synthetic
ggaggagaaaguagcacua

SEQ ID NO: 10934 - RNA, 19 nt, Artificial Sequence
  Synthetic
uugagauagaggagaacaa

SEQ ID NO: 10935 - RNA, 19 nt, Artificial Sequence
  Synthetic
cuuugaaggcaguggacau

SEQ ID NO: 10936 - RNA, 19 nt, Artificial Sequence
  Synthetic
agaaggaucucaagagugu

SEQ ID NO: 10937 - RNA, 19 nt, Artificial Sequence
  Synthetic
cagcaacugugguggagau

SEQ ID NO: 10938 - RNA, 19 nt, Artificial Sequence
  Synthetic
cuccaaagaaagaugagaa

SEQ ID NO: 10939 - RNA, 19 nt, Artificial Sequence
  Synthetic
ggacgaagacccugacuua

SEQ ID NO: 10940 - RNA, 19 nt, Artificial Sequence
  Synthetic
caacaaugaugaagucaau

SEQ ID NO: 10941 - RNA, 19 nt, Artificial Sequence
  Synthetic
ucuaugagcuuguggaaga

SEQ ID NO: 10942 - RNA, 19 nt, Artificial Sequence
  Synthetic
cauaagcacuuuagggaca

SEQ ID NO: 10943 - RNA, 19 nt, Artificial Sequence
  Synthetic
uggaauacguacaggcaca

SEQ ID NO: 10944 - RNA, 19 nt, Artificial Sequence
  Synthetic
caacaagaguuauaugaca

SEQ ID NO: 10945 - RNA, 19 nt, Artificial Sequence
  Synthetic
agauugaaguagagcacau

SEQ ID NO: 10946 - RNA, 19 nt, Artificial Sequence
  Synthetic
gugacuugauggaggguga

SEQ ID NO: 10947 - RNA, 19 nt, Artificial Sequence
  Synthetic
cugaaggaauuuacaggua

SEQ ID NO: 10948 - RNA, 19 nt, Artificial Sequence
  Synthetic
gaauuuacagguauggaaa

SEQ ID NO: 10949 - RNA, 19 nt, Artificial Sequence
  Synthetic
ggugucaagauuuggaaua

SEQ ID NO: 10950 - RNA, 19 nt, Artificial Sequence
  Synthetic
agaaggaaguauuugaaga

SEQ ID NO: 10951 - RNA, 19 nt, Artificial Sequence
  Synthetic
cuggaagaguugaguuuau

SEQ ID NO: 10952 - RNA, 19 nt, Artificial Sequence
  Synthetic
aagggaaagucaugcuuaa

SEQ ID NO: 10953 - RNA, 19 nt, Artificial Sequence
  Synthetic
ggaaagucaugcuuaaaga

SEQ ID NO: 10954 - RNA, 19 nt, Artificial Sequence
  Synthetic
agugaucaguauugguuaa

SEQ ID NO: 10955 - RNA, 19 nt, Artificial Sequence
  Synthetic
guucaugugccaauaaaua

SEQ ID NO: 10956 - RNA, 19 nt, Artificial Sequence
  Synthetic
gaaaauggauguuugcuaa

SEQ ID NO: 10957 - RNA, 19 nt, Artificial Sequence
  Synthetic
uuaccaauguggcgauuua

SEQ ID NO: 10958 - RNA, 19 nt, Artificial Sequence
  Synthetic
gggcagacuggauguuuua

SEQ ID NO: 10959 - RNA, 19 nt, Artificial Sequence
  Synthetic
acacuggcuucauggguaa

SEQ ID NO: 10960 - RNA, 19 nt, Artificial Sequence
  Synthetic
gagaagaagagaaggcgca

SEQ ID NO: 10961 - RNA, 19 nt, Artificial Sequence
  Synthetic
acacaaggagcuaccauaa

SEQ ID NO: 10962 - RNA, 19 nt, Artificial Sequence
  Synthetic
ggugagaccuaaugagaaa

SEQ ID NO: 10963 - RNA, 19 nt, Artificial Sequence
  Synthetic
ggaaagacuuaaagaugaa

SEQ ID NO: 10964 - RNA, 19 nt, Artificial Sequence
  Synthetic
gaauuaagaucgugcacaa

SEQ ID NO: 10965 - RNA, 19 nt, Artificial Sequence
  Synthetic
uuagaaacuuagugggaaa

SEQ ID NO: 10966 - RNA, 19 nt, Artificial Sequence
  Synthetic
ggaauuguguaaaguguua

SEQ ID NO: 10967 - RNA, 19 nt, Artificial Sequence
  Synthetic
uaggauagcucaaagaaua

SEQ ID NO: 10968 - RNA, 19 nt, Artificial Sequence
  Synthetic
gcacacaaacgcagaauuu

SEQ ID NO: 10969 - RNA, 19 nt, Artificial Sequence
  Synthetic
uggaagagauggaucagaa

SEQ ID NO: 10970 - RNA, 19 nt, Artificial Sequence
  Synthetic
ccaaguacauaaagcaaau

SEQ ID NO: 10971 - RNA, 19 nt, Artificial Sequence
  Synthetic
gcauuugggucaagguuuu

SEQ ID NO: 10972 - RNA, 19 nt, Artificial Sequence
  Synthetic
uggaaagacuuaaagauga

SEQ ID NO: 10973 - RNA, 19 nt, Artificial Sequence
  Synthetic
gcccaaagagccagggauu

SEQ ID NO: 10974 - RNA, 19 nt, Artificial Sequence
  Synthetic
gagccagggauuaggaauu

SEQ ID NO: 10975 - RNA, 19 nt, Artificial Sequence
  Synthetic
gcacaaaaguuuccuuaaa

SEQ ID NO: 10976 - RNA, 19 nt, Artificial Sequence
  Synthetic
ggaagagauggaucagaaa

SEQ ID NO: 10977 - RNA, 19 nt, Artificial Sequence
  Synthetic
gcagggagaauaaagauaa

SEQ ID NO: 10978 - RNA, 19 nt, Artificial Sequence
  Synthetic
ccauuuagcauguguuuau

SEQ ID NO: 10979 - RNA, 19 nt, Artificial Sequence
  Synthetic
gcaguuaggaaaugcagaa

SEQ ID NO: 10980 - RNA, 19 nt, Artificial Sequence
  Synthetic
acaaauuaggauagcucaa

SEQ ID NO: 10981 - RNA, 19 nt, Artificial Sequence
  Synthetic
ugacugaagaggaacaaau

SEQ ID NO: 10982 - RNA, 19 nt, Artificial Sequence
  Synthetic
aaacuaagcagggagaaua

SEQ ID NO: 10983 - RNA, 19 nt, Artificial Sequence
  Synthetic
agaggaacaaauuaggaua

SEQ ID NO: 10984 - RNA, 19 nt, Artificial Sequence
  Synthetic
caagaaaccaacucuauua

SEQ ID NO: 10985 - RNA, 19 nt, Artificial Sequence
  Synthetic
ccucuugucuugaaccaua

SEQ ID NO: 10986 - RNA, 19 nt, Artificial Sequence
  Synthetic
ggaaagguaucuauuacau

SEQ ID NO: 10987 - RNA, 19 nt, Artificial Sequence
  Synthetic
agaaauaguuacucaguug

SEQ ID NO: 10988 - RNA, 19 nt, Artificial Sequence
  Synthetic
auagaugacugguugauga

SEQ ID NO: 10989 - RNA, 19 nt, Artificial Sequence
  Synthetic
gaauaggucuuauacaaca

SEQ ID NO: 10990 - RNA, 19 nt, Artificial Sequence
  Synthetic
gcacuaucccuuuucuaua

SEQ ID NO: 10991 - RNA, 19 nt, Artificial Sequence
  Synthetic
guaugauggacuuuguuua

SEQ ID NO: 10992 - RNA, 19 nt, Artificial Sequence
  Synthetic
aguacaagguggagguucu

SEQ ID NO: 10993 - RNA, 19 nt, Artificial Sequence
  Synthetic
ggauggggacaaagagaaa

SEQ ID NO: 10994 - RNA, 19 nt, Artificial Sequence
  Synthetic
gggaccgggacgagaagaa

SEQ ID NO: 10995 - RNA, 19 nt, Artificial Sequence
  Synthetic
aaaccugcaucgugcgcua

SEQ ID NO: 10996 - RNA, 19 nt, Artificial Sequence
  Synthetic
caaaacacuucaagacauu

SEQ ID NO: 10997 - RNA, 19 nt, Artificial Sequence
  Synthetic
caaauuggucccugggcuu

SEQ ID NO: 10998 - RNA, 19 nt, Artificial Sequence
  Synthetic
aggucuuggagcaggagaa

SEQ ID NO: 10999 - RNA, 19 nt, Artificial Sequence
  Synthetic
gcaaguacaagguggaggu

SEQ ID NO: 11000 - RNA, 19 nt, Artificial Sequence
  Synthetic
ggauauuaaugcagaggaa

SEQ ID NO: 11001 - RNA, 19 nt, Artificial Sequence
  Synthetic
ggagaugacucaaggagaa

SEQ ID NO: 11002 - RNA, 19 nt, Artificial Sequence
  Synthetic
ggaaagaccuccacaagua

SEQ ID NO: 11003 - RNA, 19 nt, Artificial Sequence
  Synthetic
gaagaaacgagaaguguua

SEQ ID NO: 11004 - RNA, 19 nt, Artificial Sequence
  Synthetic
ggaagaagggacugaggaa

SEQ ID NO: 11005 - RNA, 19 nt, Artificial Sequence
  Synthetic
ggauaugaagagugagauu

SEQ ID NO: 11006 - RNA, 19 nt, Artificial Sequence
  Synthetic
agaaggaaaugaaugguaa

SEQ ID NO: 11007 - RNA, 19 nt, Artificial Sequence
  Synthetic
aggaagacacagaggaaaa

SEQ ID NO: 11008 - RNA, 19 nt, Artificial Sequence
  Synthetic
gcagaaagagauuuguaaa

SEQ ID NO: 11009 - RNA, 19 nt, Artificial Sequence
  Synthetic
gauuguaacaguuggagaa

SEQ ID NO: 11010 - RNA, 19 nt, Artificial Sequence
  Synthetic
gcagaauuguguuaaagaa

SEQ ID NO: 11011 - RNA, 19 nt, Artificial Sequence
  Synthetic
gcaaauaguaguucuggua

SEQ ID NO: 11012 - RNA, 19 nt, Artificial Sequence
  Synthetic
gcuaaaaguagaagccaua

SEQ ID NO: 11013 - RNA, 19 nt, Artificial Sequence
  Synthetic
aagaagggacugaggaaga

SEQ ID NO: 11014 - RNA, 19 nt, Artificial Sequence
  Synthetic
cagcagaaguuguggaccu

SEQ ID NO: 11015 - RNA, 19 nt, Artificial Sequence
  Synthetic
ccuuaaaaguggauaugaa

SEQ ID NO: 11016 - RNA, 19 nt, Artificial Sequence
  Synthetic
cugcaggaguugagaugau

SEQ ID NO: 11017 - RNA, 19 nt, Artificial Sequence
  Synthetic
ugacuucagaugaggauaa

SEQ ID NO: 11018 - RNA, 19 nt, Artificial Sequence
  Synthetic
aguguuagcucgaagaaaa

SEQ ID NO: 11019 - RNA, 19 nt, Artificial Sequence
  Synthetic
cagagaaaguguuguguaa

SEQ ID NO: 11020 - RNA, 19 nt, Artificial Sequence
  Synthetic
caacaaacuucguaaacua

SEQ ID NO: 11021 - RNA, 19 nt, Artificial Sequence
  Synthetic
gaagaagauuauaggcuua

SEQ ID NO: 11022 - RNA, 19 nt, Artificial Sequence
  Synthetic
cguaauaaugggagccaaa

SEQ ID NO: 11023 - RNA, 19 nt, Artificial Sequence
  Synthetic
cagauucaguuuagagaua

SEQ ID NO: 11024 - RNA, 19 nt, Artificial Sequence
  Synthetic
gagaaaauguggaaaacaa

SEQ ID NO: 11025 - RNA, 19 nt, Artificial Sequence
  Synthetic
gagaaaguguuguguaauu

SEQ ID NO: 11026 - RNA, 19 nt, Artificial Sequence
  Synthetic
aggugaaaguacugaggaa

SEQ ID NO: 11027 - RNA, 19 nt, Artificial Sequence
  Synthetic
gagaauaucggcagagaga

SEQ ID NO: 11028 - RNA, 19 nt, Artificial Sequence
  Synthetic
cagaauauacagaaggcaa

SEQ ID NO: 11029 - RNA, 19 nt, Artificial Sequence
  Synthetic
ccaaagaacagauugacaa

SEQ ID NO: 11030 - RNA, 19 nt, Artificial Sequence
  Synthetic
cagacaaacuggaaauaca

SEQ ID NO: 11031 - RNA, 19 nt, Artificial Sequence
  Synthetic
guaaauaaccugagugaag

SEQ ID NO: 11032 - RNA, 19 nt, Artificial Sequence
  Synthetic
gugaaaguacugaggaaga

SEQ ID NO: 11033 - RNA, 19 nt, Artificial Sequence
  Synthetic
aaugagaaguuuuggugaa

SEQ ID NO: 11034 - RNA, 19 nt, Artificial Sequence
  Synthetic
ugacaaaggaaguggugau

SEQ ID NO: 11035 - RNA, 19 nt, Artificial Sequence
  Synthetic
gccaaaggcaaguggaaaa

SEQ ID NO: 11036 - RNA, 19 nt, Artificial Sequence
  Synthetic
guggagaaaauguggaaaa

SEQ ID NO: 11037 - RNA, 19 nt, Artificial Sequence
  Synthetic
gauaaauguuaacccguaa

SEQ ID NO: 11038 - RNA, 19 nt, Artificial Sequence
  Synthetic
gagugaaauuccacgaaga

SEQ ID NO: 11039 - RNA, 19 nt, Artificial Sequence
  Synthetic
agaaacuagcucagauuua

SEQ ID NO: 11040 - RNA, 19 nt, Artificial Sequence
  Synthetic
agaagugggcaaagaggaa

SEQ ID NO: 11041 - RNA, 19 nt, Artificial Sequence
  Synthetic
caucggagaaccagagcaa

SEQ ID NO: 11042 - RNA, 19 nt, Artificial Sequence
  Synthetic
gcagauaaugacagguuuu

SEQ ID NO: 11043 - RNA, 19 nt, Artificial Sequence
  Synthetic
caucuagaucagaacgaaa

SEQ ID NO: 11044 - RNA, 19 nt, Artificial Sequence
  Synthetic
auuauaggcuuaugagaga

SEQ ID NO: 11045 - RNA, 19 nt, Artificial Sequence
  Synthetic
ccacgaagaucucaucaua

SEQ ID NO: 11046 - RNA, 19 nt, Artificial Sequence
  Synthetic
cuucagaugaugugucuaa

SEQ ID NO: 11047 - RNA, 19 nt, Artificial Sequence
  Synthetic
gagugguacuuaaauguaa

SEQ ID NO: 11048 - RNA, 19 nt, Artificial Sequence
  Synthetic
gggcaaagaggaaaccaau

SEQ ID NO: 11049 - RNA, 19 nt, Artificial Sequence
  Synthetic
ccauaggguucuacagcga

SEQ ID NO: 11050 - RNA, 19 nt, Artificial Sequence
  Synthetic
ucaagaggauguucagcaa

SEQ ID NO: 11051 - RNA, 19 nt, Artificial Sequence
  Synthetic
cagaaaugugugcagacua

SEQ ID NO: 11052 - RNA, 19 nt, Artificial Sequence
  Synthetic
gagaacacguauaggcugu

SEQ ID NO: 11053 - RNA, 19 nt, Artificial Sequence
  Synthetic
cguauaggcuguccugcaa

SEQ ID NO: 11054 - RNA, 19 nt, Artificial Sequence
  Synthetic
caaccuuggugguggccca

SEQ ID NO: 11055 - RNA, 19 nt, Artificial Sequence
  Synthetic
aggcacagagugagcgaua

SEQ ID NO: 11056 - RNA, 19 nt, Artificial Sequence
  Synthetic
gcuuaaaggugaugccaag

SEQ ID NO: 11057 - RNA, 19 nt, Artificial Sequence
  Synthetic
agagugagcgauacggaua

SEQ ID NO: 11058 - RNA, 19 nt, Artificial Sequence
  Synthetic
gcgcagucugucuggaaga

SEQ ID NO: 11059 - RNA, 19 nt, Artificial Sequence
  Synthetic
ggugaagcuucuagguaua

SEQ ID NO: 11060 - RNA, 19 nt, Artificial Sequence
  Synthetic
gcaucgaagugguggaaga

SEQ ID NO: 11061 - RNA, 19 nt, Artificial Sequence
  Synthetic
gcugagaaauccaggguca

SEQ ID NO: 11062 - RNA, 19 nt, Artificial Sequence
  Synthetic
ggacaauaaagaugacaau

SEQ ID NO: 11063 - RNA, 19 nt, Artificial Sequence
  Synthetic
gggugaagcuucuagguau

SEQ ID NO: 11064 - RNA, 19 nt, Artificial Sequence
  Synthetic
aggagaagcugcugaauga

SEQ ID NO: 11065 - RNA, 19 nt, Artificial Sequence
  Synthetic
cgcaagagcuauaggcuga

SEQ ID NO: 11066 - RNA, 19 nt, Artificial Sequence
  Synthetic
gcacggagaugaaggagga

SEQ ID NO: 11067 - RNA, 19 nt, Artificial Sequence
  Synthetic
gggugacagcugagaggaa

SEQ ID NO: 11068 - RNA, 19 nt, Artificial Sequence
  Synthetic
ccacaacgaauuauggcaa

SEQ ID NO: 11069 - RNA, 19 nt, Artificial Sequence
  Synthetic
caucagugcuccuggcaga

SEQ ID NO: 11070 - RNA, 19 nt, Artificial Sequence
  Synthetic
gguauaucuuccugaccaa

SEQ ID NO: 11071 - RNA, 19 nt, Artificial Sequence
  Synthetic
cccaagaggaggaaggaca

SEQ ID NO: 11072 - RNA, 19 nt, Artificial Sequence
  Synthetic
cgaagugguggaagaacua

SEQ ID NO: 11073 - RNA, 19 nt, Artificial Sequence
  Synthetic
gcaaagagagcacggagau

SEQ ID NO: 11074 - RNA, 19 nt, Artificial Sequence
  Synthetic
ggaaauggcucuacgaggu

SEQ ID NO: 11075 - RNA, 19 nt, Artificial Sequence
  Synthetic
accaagagccagaagguuu

SEQ ID NO: 11076 - RNA, 19 nt, Artificial Sequence
  Synthetic
ggacaaugaggaggaggaa

SEQ ID NO: 11077 - RNA, 19 nt, Artificial Sequence
  Synthetic
gcuauggcucugagggaca

SEQ ID NO: 11078 - RNA, 19 nt, Artificial Sequence
  Synthetic
ugagggacacagaggacaa

SEQ ID NO: 11079 - RNA, 19 nt, Artificial Sequence
  Synthetic
aggaggaaagccagggaca

SEQ ID NO: 11080 - RNA, 19 nt, Artificial Sequence
  Synthetic
ggaagacccucaaagauga

SEQ ID NO: 11081 - RNA, 19 nt, Artificial Sequence
  Synthetic
gcacagagguugcugggcu

SEQ ID NO: 11082 - RNA, 19 nt, Artificial Sequence
  Synthetic
ucgaagugguggaagaacu

SEQ ID NO: 11083 - RNA, 19 nt, Artificial Sequence
  Synthetic
acaaugaggaggaggaaag

SEQ ID NO: 11084 - RNA, 19 nt, Artificial Sequence
  Synthetic
ggcaaagagagcacggaga

SEQ ID NO: 11085 - RNA, 19 nt, Artificial Sequence
  Synthetic
guuuaauacccgaugagaa

SEQ ID NO: 11086 - RNA, 19 nt, Artificial Sequence
  Synthetic
cuaccagucuaaagaacaa

SEQ ID NO: 11087 - RNA, 19 nt, Artificial Sequence
  Synthetic
uuuaauacccgaugagaau

SEQ ID NO: 11088 - RNA, 19 nt, Artificial Sequence
  Synthetic
cuucaguggcaguuuaaua

SEQ ID NO: 11089 - RNA, 19 nt, Artificial Sequence
  Synthetic
cugguuugccucagugaaa

SEQ ID NO: 11090 - RNA, 19 nt, Artificial Sequence
  Synthetic
guauggaccacuacaagaa

SEQ ID NO: 11091 - RNA, 19 nt, Artificial Sequence
  Synthetic
agcaacugauguagccaaa

SEQ ID NO: 11092 - RNA, 19 nt, Artificial Sequence
  Synthetic
agaacugcgcugaguguga

SEQ ID NO: 11093 - RNA, 19 nt, Artificial Sequence
  Synthetic
acucaaacccuauggacua

SEQ ID NO: 11094 - RNA, 19 nt, Artificial Sequence
  Synthetic
cggcagauaaagagaaaau

SEQ ID NO: 11095 - RNA, 19 nt, Artificial Sequence
  Synthetic
gagaccaggagcacagaaa

SEQ ID NO: 11096 - RNA, 19 nt, Artificial Sequence
  Synthetic
cguuggagcacguggacca

SEQ ID NO: 11097 - RNA, 19 nt, Artificial Sequence
  Synthetic
ucacacagcuccucaauca

SEQ ID NO: 11098 - RNA, 19 nt, Artificial Sequence
  Synthetic
ccggaagagaccaggagca

SEQ ID NO: 11099 - RNA, 19 nt, Artificial Sequence
  Synthetic
ggauuauaucuguccaaga

SEQ ID NO: 11100 - RNA, 19 nt, Artificial Sequence
  Synthetic
acgacuacgcgcuggguga

SEQ ID NO: 11101 - RNA, 19 nt, Artificial Sequence
  Synthetic
accggcagauaaagagaaa

SEQ ID NO: 11102 - RNA, 19 nt, Artificial Sequence
  Synthetic
ugucuaaccucacccucua

SEQ ID NO: 11103 - RNA, 19 nt, Artificial Sequence
  Synthetic
ccaagaugcgagucugguu

SEQ ID NO: 11104 - RNA, 19 nt, Artificial Sequence
  Synthetic
gcagggcuacggacaguuu

SEQ ID NO: 11105 - RNA, 19 nt, Artificial Sequence
  Synthetic
gacagaacacggccacgaa

SEQ ID NO: 11106 - RNA, 19 nt, Artificial Sequence
  Synthetic
cuacggacaguuugcuuuc

SEQ ID NO: 11107 - RNA, 19 nt, Artificial Sequence
  Synthetic
aggaagaagaggaggagaa

SEQ ID NO: 11108 - RNA, 19 nt, Artificial Sequence
  Synthetic
ccucaacgccggagagcaa

SEQ ID NO: 11109 - RNA, 19 nt, Artificial Sequence
  Synthetic
cggcacugcucaaguacaa

SEQ ID NO: 11110 - RNA, 19 nt, Artificial Sequence
  Synthetic
acaugaaagaccaggaaga

SEQ ID NO: 11111 - RNA, 19 nt, Artificial Sequence
  Synthetic
augaagaggaaauggaaga

SEQ ID NO: 11112 - RNA, 19 nt, Artificial Sequence
  Synthetic
gcucuauguaugagauuau

SEQ ID NO: 11113 - RNA, 19 nt, Artificial Sequence
  Synthetic
ccuuggagauccugucaaa

SEQ ID NO: 11114 - RNA, 19 nt, Artificial Sequence
  Synthetic
accaaaagguucagggaga

SEQ ID NO: 11115 - RNA, 19 nt, Artificial Sequence
  Synthetic
cuucauaucccgaaaccaa

SEQ ID NO: 11116 - RNA, 19 nt, Artificial Sequence
  Synthetic
gugaagcccucgaggugua

SEQ ID NO: 11117 - RNA, 19 nt, Artificial Sequence
  Synthetic
caaaugaccacuugcuuua

SEQ ID NO: 11118 - RNA, 19 nt, Artificial Sequence
  Synthetic
cuuaaaaugccuagaaaga

SEQ ID NO: 11119 - RNA, 19 nt, Artificial Sequence
  Synthetic
cgauggguuuuaaggacaa

SEQ ID NO: 11120 - RNA, 19 nt, Artificial Sequence
  Synthetic
ggcuuuaagugccggaaau

SEQ ID NO: 11121 - RNA, 19 nt, Artificial Sequence
  Synthetic
ggucauagaaguagggaaa

SEQ ID NO: 11122 - RNA, 19 nt, Artificial Sequence
  Synthetic
gcucaaagcaggaagcaga

SEQ ID NO: 11123 - RNA, 19 nt, Artificial Sequence
  Synthetic
aauuaaaggcagaugcuaa

SEQ ID NO: 11124 - RNA, 19 nt, Artificial Sequence
  Synthetic
aaacaaggagacaaggaaa

SEQ ID NO: 11125 - RNA, 19 nt, Artificial Sequence
  Synthetic
aaacauggcccuuggguga

SEQ ID NO: 11126 - RNA, 19 nt, Artificial Sequence
  Synthetic
auuaaaggcagaugcuaaa

SEQ ID NO: 11127 - RNA, 19 nt, Artificial Sequence
  Synthetic
gaaacaaggagacaaggaa

SEQ ID NO: 11128 - RNA, 19 nt, Artificial Sequence
  Synthetic
caacccaaccuuugaagaa

SEQ ID NO: 11129 - RNA, 19 nt, Artificial Sequence
  Synthetic
cccuguauccaaugaaaua

SEQ ID NO: 11130 - RNA, 19 nt, Artificial Sequence
  Synthetic
acggaaugcaagagcucaa

SEQ ID NO: 11131 - RNA, 19 nt, Artificial Sequence
  Synthetic
ggauguugaagauggauca

SEQ ID NO: 11132 - RNA, 19 nt, Artificial Sequence
  Synthetic
gggaaguagaagugggaaa

SEQ ID NO: 11133 - RNA, 19 nt, Artificial Sequence
  Synthetic
gagaaugccaugugugaaa

SEQ ID NO: 11134 - RNA, 19 nt, Artificial Sequence
  Synthetic
ugagggagguagagggcaa

SEQ ID NO: 11135 - RNA, 19 nt, Artificial Sequence
  Synthetic
aggaggagcaagagaaaga

SEQ ID NO: 11136 - RNA, 19 nt, Artificial Sequence
  Synthetic
cagauuaggaggagcaaga

SEQ ID NO: 11137 - RNA, 19 nt, Artificial Sequence
  Synthetic
gauacaagaugaagagaug

SEQ ID NO: 11138 - RNA, 19 nt, Artificial Sequence
  Synthetic
aguagaagugggaaacaaa

SEQ ID NO: 11139 - RNA, 19 nt, Artificial Sequence
  Synthetic
cuaaauggauauugggugu

SEQ ID NO: 11140 - RNA, 19 nt, Artificial Sequence
  Synthetic
ggauauuggguguguguca

SEQ ID NO: 11141 - RNA, 19 nt, Artificial Sequence
  Synthetic
auagaaaagcugugcgaua

SEQ ID NO: 11142 - RNA, 19 nt, Artificial Sequence
  Synthetic
gagaugaacauuuuagcaa

SEQ ID NO: 11143 - RNA, 19 nt, Artificial Sequence
  Synthetic
ggacagaauuaucaagcca

SEQ ID NO: 11144 - RNA, 19 nt, Artificial Sequence
  Synthetic
gaaagaggcagaaagagaa

SEQ ID NO: 11145 - RNA, 19 nt, Artificial Sequence
  Synthetic
ggaauaauauagaacgagu

SEQ ID NO: 11146 - RNA, 19 nt, Artificial Sequence
  Synthetic
ugaaagacccagugaccau

SEQ ID NO: 11147 - RNA, 19 nt, Artificial Sequence
  Synthetic
agaaugaacaagagaugau

SEQ ID NO: 11148 - RNA, 19 nt, Artificial Sequence
  Synthetic
aaguagaagugggaaacaa

SEQ ID NO: 11149 - RNA, 19 nt, Artificial Sequence
  Synthetic
cuaaacaccagaagcacua

SEQ ID NO: 11150 - RNA, 19 nt, Artificial Sequence
  Synthetic
agguagaauauaagaggga

SEQ ID NO: 11151 - RNA, 19 nt, Artificial Sequence
  Synthetic
gccuugagcccuugaggaa

SEQ ID NO: 11152 - RNA, 19 nt, Artificial Sequence
  Synthetic
cuggaaggaucuagaugau

SEQ ID NO: 11153 - RNA, 19 nt, Artificial Sequence
  Synthetic
gagaugauucuuaggcaga

SEQ ID NO: 11154 - RNA, 19 nt, Artificial Sequence
  Synthetic
guaugaagauggagacaaa

SEQ ID NO: 11155 - RNA, 19 nt, Artificial Sequence
  Synthetic
gaaugaaaguauagccaaa

SEQ ID NO: 11156 - RNA, 19 nt, Artificial Sequence
  Synthetic
uguagaaaguguagacuaa

SEQ ID NO: 11157 - RNA, 19 nt, Artificial Sequence
  Synthetic
agacaguagucaagaagaa

SEQ ID NO: 11158 - RNA, 19 nt, Artificial Sequence
  Synthetic
agacauagagcuagaagaa

SEQ ID NO: 11159 - RNA, 19 nt, Artificial Sequence
  Synthetic
caagaaaggagaugaguau

SEQ ID NO: 11160 - RNA, 19 nt, Artificial Sequence
  Synthetic
caguauagcuugcaauuaa

SEQ ID NO: 11161 - RNA, 19 nt, Artificial Sequence
  Synthetic
caggauagacauagagcua

SEQ ID NO: 11162 - RNA, 19 nt, Artificial Sequence
  Synthetic
ggauagacauagagcuaga

SEQ ID NO: 11163 - RNA, 19 nt, Artificial Sequence
  Synthetic
caucagaacaugacagaau

SEQ ID NO: 11164 - RNA, 19 nt, Artificial Sequence
  Synthetic
uggaauauguucuggcauu

SEQ ID NO: 11165 - RNA, 19 nt, Artificial Sequence
  Synthetic
gaaacuuccuguacauaaa

SEQ ID NO: 11166 - RNA, 19 nt, Artificial Sequence
  Synthetic
uaaacuauguacagaggaa

SEQ ID NO: 11167 - RNA, 19 nt, Artificial Sequence
  Synthetic
gguuuuaaaugcacagaga

SEQ ID NO: 11168 - RNA, 19 nt, Artificial Sequence
  Synthetic
ugacaguagugaugcagaa

SEQ ID NO: 11169 - RNA, 19 nt, Artificial Sequence
  Synthetic
acauagagcuagaagaaac

SEQ ID NO: 11170 - RNA, 19 nt, Artificial Sequence
  Synthetic
agaaaggagaugaguauga

SEQ ID NO: 11171 - RNA, 19 nt, Artificial Sequence
  Synthetic
agaggaaacuguucaagua

SEQ ID NO: 11172 - RNA, 19 nt, Artificial Sequence
  Synthetic
gggauuacaacauagcaaa

SEQ ID NO: 11173 - RNA, 19 nt, Artificial Sequence
  Synthetic
acauugagguacuaaagaa

SEQ ID NO: 11174 - RNA, 19 nt, Artificial Sequence
  Synthetic
gcaauuaagaccuagauca

SEQ ID NO: 11175 - RNA, 19 nt, Artificial Sequence
  Synthetic
aaacagacuucguaaagau

SEQ ID NO: 11176 - RNA, 19 nt, Artificial Sequence
  Synthetic
caguagugaugcagaaaau

SEQ ID NO: 11177 - RNA, 19 nt, Artificial Sequence
  Synthetic
ucaagaaaggagaugagua

SEQ ID NO: 11178 - RNA, 19 nt, Artificial Sequence
  Synthetic
acuaugaggaagacgacaa

SEQ ID NO: 11179 - RNA, 19 nt, Artificial Sequence
  Synthetic
agaagaaaaugaagugaca

SEQ ID NO: 11180 - RNA, 19 nt, Artificial Sequence
  Synthetic
aggaagacgacaaugaaga

SEQ ID NO: 11181 - RNA, 19 nt, Artificial Sequence
  Synthetic
ccacacaagucuacaccau

SEQ ID NO: 11182 - RNA, 19 nt, Artificial Sequence
  Synthetic
ggauuacaacauagcaaau

SEQ ID NO: 11183 - RNA, 19 nt, Artificial Sequence
  Synthetic
ugacagaaucuucagacua

SEQ ID NO: 11184 - RNA, 19 nt, Artificial Sequence
  Synthetic
ggacaguaaagaaggguga

SEQ ID NO: 11185 - RNA, 19 nt, Artificial Sequence
  Synthetic
ccacaaugcaguugcugua

SEQ ID NO: 11186 - RNA, 19 nt, Artificial Sequence
  Synthetic
cugcacguuuaaagagaaa

SEQ ID NO: 11187 - RNA, 19 nt, Artificial Sequence
  Synthetic
cagucugcauagagagcua

SEQ ID NO: 11188 - RNA, 19 nt, Artificial Sequence
  Synthetic
uauugaaggcccugggaau

SEQ ID NO: 11189 - RNA, 19 nt, Artificial Sequence
  Synthetic
agaaugaugucguccgaau

SEQ ID NO: 11190 - RNA, 19 nt, Artificial Sequence
  Synthetic
cggagaugcagccaagaaa

SEQ ID NO: 11191 - RNA, 19 nt, Artificial Sequence
  Synthetic
aagaagggugacaaggaaa

SEQ ID NO: 11192 - RNA, 19 nt, Artificial Sequence
  Synthetic
aagaaagccaucaguaaau

SEQ ID NO: 11193 - RNA, 19 nt, Artificial Sequence
  Synthetic
uugacaaccaggacaguaa

SEQ ID NO: 11194 - RNA, 19 nt, Artificial Sequence
  Synthetic
caaccaggacaguaaagaa

SEQ ID NO: 11195 - RNA, 19 nt, Artificial Sequence
  Synthetic
aaagaagggugacaaggaa

SEQ ID NO: 11196 - RNA, 19 nt, Artificial Sequence
  Synthetic
auucagaagaucagguaca

SEQ ID NO: 11197 - RNA, 19 nt, Artificial Sequence
  Synthetic
cagcauggcucauauucua

SEQ ID NO: 11198 - RNA, 19 nt, Artificial Sequence
  Synthetic
caguaaagaagggugacaa

SEQ ID NO: 11199 - RNA, 19 nt, Artificial Sequence
  Synthetic
cuauaagccuaaugacaua

SEQ ID NO: 11200 - RNA, 19 nt, Artificial Sequence
  Synthetic
gugaagaggagacaaauaa

SEQ ID NO: 11201 - RNA, 19 nt, Artificial Sequence
  Synthetic
cuagugaagaggagacaaa

SEQ ID NO: 11202 - RNA, 19 nt, Artificial Sequence
  Synthetic
gagaguggcaggaguuaua

SEQ ID NO: 11203 - RNA, 19 nt, Artificial Sequence
  Synthetic
cgaucaaaguacucagaga

SEQ ID NO: 11204 - RNA, 19 nt, Artificial Sequence
  Synthetic
cggagauggcagcgauuaa

SEQ ID NO: 11205 - RNA, 19 nt, Artificial Sequence
  Synthetic
agugaagaggagacaaaua

SEQ ID NO: 11206 - RNA, 19 nt, Artificial Sequence
  Synthetic
ggaagaagcuccacuuuga

SEQ ID NO: 11207 - RNA, 19 nt, Artificial Sequence
  Synthetic
gcgauuaacaacagaucuu

SEQ ID NO: 11208 - RNA, 19 nt, Artificial Sequence
  Synthetic
gcuauaagccuaaugacau

SEQ ID NO: 11209 - RNA, 19 nt, Artificial Sequence
  Synthetic
caacagaucuucagaacac

SEQ ID NO: 11210 - RNA, 19 nt, Artificial Sequence
  Synthetic
gaagagaguggcaggaguu

SEQ ID NO: 11211 - RNA, 19 nt, Artificial Sequence
  Synthetic
ucaaaugaacugccugaaa

SEQ ID NO: 11212 - RNA, 19 nt, Artificial Sequence
  Synthetic
ugcaggaaccucagauaaa

SEQ ID NO: 11213 - RNA, 19 nt, Artificial Sequence
  Synthetic
guggagugaucaucuauaa

SEQ ID NO: 11214 - RNA, 19 nt, Artificial Sequence
  Synthetic
cgcuauaagccuaaugaca

SEQ ID NO: 11215 - RNA, 19 nt, Artificial Sequence
  Synthetic
cugcaggaaccucagauaa

SEQ ID NO: 11216 - RNA, 19 nt, Artificial Sequence
  Synthetic
ggaaucauguguugucaga

SEQ ID NO: 11217 - RNA, 19 nt, Artificial Sequence
  Synthetic
aagaugucguugugguuau

SEQ ID NO: 11218 - RNA, 19 nt, Artificial Sequence
  Synthetic
gguuguaccuucacacaga

SEQ ID NO: 11219 - RNA, 19 nt, Artificial Sequence
  Synthetic
uaucaaacucuaagggaaa

SEQ ID NO: 11220 - RNA, 19 nt, Artificial Sequence
  Synthetic
guaucaaacucuaagggaa

SEQ ID NO: 11221 - RNA, 19 nt, Artificial Sequence
  Synthetic
aggaagaagaggaggagga

SEQ ID NO: 11222 - RNA, 19 nt, Artificial Sequence
  Synthetic
cauuuuaagccauuggaaa

SEQ ID NO: 11223 - RNA, 19 nt, Artificial Sequence
  Synthetic
uguaaaagcugcaucguaa

SEQ ID NO: 11224 - RNA, 19 nt, Artificial Sequence
  Synthetic
acgaggaguuggaagaaga

SEQ ID NO: 11225 - RNA, 19 nt, Artificial Sequence
  Synthetic
aagaggagcuggaggagga

SEQ ID NO: 11226 - RNA, 19 nt, Artificial Sequence
  Synthetic
aggaggaggaggaggacau

SEQ ID NO: 11227 - RNA, 19 nt, Artificial Sequence
  Synthetic
uguucgaguuucaggagaa

SEQ ID NO: 11228 - RNA, 19 nt, Artificial Sequence
  Synthetic
aggacgaggaguuggaaga

SEQ ID NO: 11229 - RNA, 19 nt, Artificial Sequence
  Synthetic
aggacgaggacgaggaguu

SEQ ID NO: 11230 - RNA, 19 nt, Artificial Sequence
  Synthetic
aggaggaggacaugaguca

SEQ ID NO: 11231 - RNA, 19 nt, Artificial Sequence
  Synthetic
gcuucgaggacgaggacga

SEQ ID NO: 11232 - RNA, 19 nt, Artificial Sequence
  Synthetic
aggaggaagaagaggagga

SEQ ID NO: 11233 - RNA, 19 nt, Artificial Sequence
  Synthetic
aagaagaggagcuggagga

SEQ ID NO: 11234 - RNA, 19 nt, Artificial Sequence
  Synthetic
ugacagagcugguggaaca

SEQ ID NO: 11235 - RNA, 19 nt, Artificial Sequence
  Synthetic
ggaacaucuuguagacauu

SEQ ID NO: 11236 - RNA, 19 nt, Artificial Sequence
  Synthetic
ccuucuauucaguggacaa

SEQ ID NO: 11237 - RNA, 19 nt, Artificial Sequence
  Synthetic
ccuggaaauuaccugauaa

SEQ ID NO: 11238 - RNA, 19 nt, Artificial Sequence
  Synthetic
uggcaguagagaagagcau

SEQ ID NO: 11239 - RNA, 19 nt, Artificial Sequence
  Synthetic
ggaaagcauuacugggaag

SEQ ID NO: 11240 - RNA, 19 nt, Artificial Sequence
  Synthetic
gcaguagagaagagcauca

SEQ ID NO: 11241 - RNA, 19 nt, Artificial Sequence
  Synthetic
cagacaacgaacugagcau

SEQ ID NO: 11242 - RNA, 19 nt, Artificial Sequence
  Synthetic
gagaagagcaucacagaag

SEQ ID NO: 11243 - RNA, 19 nt, Artificial Sequence
  Synthetic
ggacucuuguuguguggaa

SEQ ID NO: 11244 - RNA, 19 nt, Artificial Sequence
  Synthetic
ugaaccuugaggagggaaa

SEQ ID NO: 11245 - RNA, 19 nt, Artificial Sequence
  Synthetic
caguggacaaucaggagaa

SEQ ID NO: 11246 - RNA, 19 nt, Artificial Sequence
  Synthetic
uggaacaucuuguagacau

SEQ ID NO: 11247 - RNA, 19 nt, Artificial Sequence
  Synthetic
ggaaacuguccuuggcuca

SEQ ID NO: 11248 - RNA, 19 nt, Artificial Sequence
  Synthetic
uggcacauggucaaggaaa

SEQ ID NO: 11249 - RNA, 19 nt, Artificial Sequence
  Synthetic
ugaaguuggugaaaggaaa

SEQ ID NO: 11250 - RNA, 19 nt, Artificial Sequence
  Synthetic
ccagcgauuacuagagaaa

SEQ ID NO: 11251 - RNA, 19 nt, Artificial Sequence
  Synthetic
ucgaacaucugaagaaaga

SEQ ID NO: 11252 - RNA, 19 nt, Artificial Sequence
  Synthetic
ggaaggagguggucuacuu

SEQ ID NO: 11253 - RNA, 19 nt, Artificial Sequence
  Synthetic
ccaaggaaccugcggccua

SEQ ID NO: 11254 - RNA, 19 nt, Artificial Sequence
  Synthetic
ccagaaacugccagacaau

SEQ ID NO: 11255 - RNA, 19 nt, Artificial Sequence
  Synthetic
ggaagauacagguggaaac

SEQ ID NO: 11256 - RNA, 19 nt, Artificial Sequence
  Synthetic
gcuggauguugcaggauau

SEQ ID NO: 11257 - RNA, 19 nt, Artificial Sequence
  Synthetic
ugaagaaagagcaagaaga

SEQ ID NO: 11258 - RNA, 19 nt, Artificial Sequence
  Synthetic
ccucgaacaucugaagaaa

SEQ ID NO: 11259 - RNA, 19 nt, Artificial Sequence
  Synthetic
uggccaauguuguagaaaa

SEQ ID NO: 11260 - RNA, 19 nt, Artificial Sequence
  Synthetic
gagcaggcaccgaugagua

SEQ ID NO: 11261 - RNA, 19 nt, Artificial Sequence
  Synthetic
gggugauaaggcugaggaa

SEQ ID NO: 11262 - RNA, 19 nt, Artificial Sequence
  Synthetic
ggaugauugcagaguugaa

SEQ ID NO: 11263 - RNA, 19 nt, Artificial Sequence
  Synthetic
ccaaacugcuguugaagaa

SEQ ID NO: 11264 - RNA, 19 nt, Artificial Sequence
  Synthetic
ccagaaauuucguuaguca

SEQ ID NO: 11265 - RNA, 19 nt, Artificial Sequence
  Synthetic
gaagaaacccaauaccaaa

SEQ ID NO: 11266 - RNA, 19 nt, Artificial Sequence
  Synthetic
cugauaacacagaaacuua

SEQ ID NO: 11267 - RNA, 19 nt, Artificial Sequence
  Synthetic
ucagauaguuccugugaca

SEQ ID NO: 11268 - RNA, 19 nt, Artificial Sequence
  Synthetic
acacagaaacuuaccaaga

SEQ ID NO: 11269 - RNA, 19 nt, Artificial Sequence
  Synthetic
gggagauccuagccagauu

SEQ ID NO: 11270 - RNA, 19 nt, Artificial Sequence
  Synthetic
ugaagaaacccaauaccaa

SEQ ID NO: 11271 - RNA, 19 nt, Artificial Sequence
  Synthetic
auaccaaacugcuguugaa

SEQ ID NO: 11272 - RNA, 19 nt, Artificial Sequence
  Synthetic
auggagaauuugugaaucu

SEQ ID NO: 11273 - RNA, 19 nt, Artificial Sequence
  Synthetic
gggaaaagcuugacgauua

SEQ ID NO: 11274 - RNA, 19 nt, Artificial Sequence
  Synthetic
agaaagaaauggagugauu

SEQ ID NO: 11275 - RNA, 19 nt, Artificial Sequence
  Synthetic
caaugaaacuccagaggaa

SEQ ID NO: 11276 - RNA, 19 nt, Artificial Sequence
  Synthetic
gcuaagaccagaagagaga

SEQ ID NO: 11277 - RNA, 19 nt, Artificial Sequence
  Synthetic
gaugauguucaaagagaaa

SEQ ID NO: 11278 - RNA, 19 nt, Artificial Sequence
  Synthetic
guaucgaauuuacggauua

SEQ ID NO: 11279 - RNA, 19 nt, Artificial Sequence
  Synthetic
aggcuuaaucacagagcua

SEQ ID NO: 11280 - RNA, 19 nt, Artificial Sequence
  Synthetic
gaagaugacaguacagauu

SEQ ID NO: 11281 - RNA, 19 nt, Artificial Sequence
  Synthetic
cuacgagucuuuuggcuaa

SEQ ID NO: 11282 - RNA, 19 nt, Artificial Sequence
  Synthetic
cagaggaagcuguaagaga

SEQ ID NO: 11283 - RNA, 19 nt, Artificial Sequence
  Synthetic
gaacugugcuuaaaaguaa

SEQ ID NO: 11284 - RNA, 19 nt, Artificial Sequence
  Synthetic
gcacuuugccuucggaaau

SEQ ID NO: 11285 - RNA, 19 nt, Artificial Sequence
  Synthetic
agaccagaagagagacuua

SEQ ID NO: 11286 - RNA, 19 nt, Artificial Sequence
  Synthetic
caguacagauugugaugau

SEQ ID NO: 11287 - RNA, 19 nt, Artificial Sequence
  Synthetic
ugacaggcgucuuggcuuu

SEQ ID NO: 11288 - RNA, 19 nt, Artificial Sequence
  Synthetic
aguagaaacaugugccuuu

SEQ ID NO: 11289 - RNA, 19 nt, Artificial Sequence
  Synthetic
acagcuaacauuuggaauu

SEQ ID NO: 11290 - RNA, 19 nt, Artificial Sequence
  Synthetic
cagagagacuuuacuguuu

SEQ ID NO: 11291 - RNA, 19 nt, Artificial Sequence
  Synthetic
guucaaagagaaagaaaug

SEQ ID NO: 11292 - RNA, 19 nt, Artificial Sequence
  Synthetic
uggaagagauggaaaguaa

SEQ ID NO: 11293 - RNA, 19 nt, Artificial Sequence
  Synthetic
gcugaauguucuugaauua

SEQ ID NO: 11294 - RNA, 19 nt, Artificial Sequence
  Synthetic
ggucaaagaguuaguggaa

SEQ ID NO: 11295 - RNA, 19 nt, Artificial Sequence
  Synthetic
ccacagaauuucaagauau

SEQ ID NO: 11296 - RNA, 19 nt, Artificial Sequence
  Synthetic
gaagaggggucaagaguua

SEQ ID NO: 11297 - RNA, 19 nt, Artificial Sequence
  Synthetic
aggaguggcuagagaagaa

SEQ ID NO: 11298 - RNA, 19 nt, Artificial Sequence
  Synthetic
ugaagaaggugcauugaua

SEQ ID NO: 11299 - RNA, 19 nt, Artificial Sequence
  Synthetic
ggaaauuguggaugagaga

SEQ ID NO: 11300 - RNA, 19 nt, Artificial Sequence
  Synthetic
aagaugagguagaagacua

SEQ ID NO: 11301 - RNA, 19 nt, Artificial Sequence
  Synthetic
gagcaaacccuuacaaaca

SEQ ID NO: 11302 - RNA, 19 nt, Artificial Sequence
  Synthetic
gggaagaugagguagaaga

SEQ ID NO: 11303 - RNA, 19 nt, Artificial Sequence
  Synthetic
gguagaagccuuaugaaaa

SEQ ID NO: 11304 - RNA, 19 nt, Artificial Sequence
  Synthetic
uggaauaggagaaagcuua

SEQ ID NO: 11305 - RNA, 19 nt, Artificial Sequence
  Synthetic
cagagaaauuaauggacuu

SEQ ID NO: 11306 - RNA, 19 nt, Artificial Sequence
  Synthetic
gaucaaagguaugguaaga

SEQ ID NO: 11307 - RNA, 19 nt, Artificial Sequence
  Synthetic
uaaggugacugcagagaaa

SEQ ID NO: 11308 - RNA, 19 nt, Artificial Sequence
  Synthetic
aggaagagacccuagcaua

SEQ ID NO: 11309 - RNA, 19 nt, Artificial Sequence
  Synthetic
ugauguagaccaagaggaa

SEQ ID NO: 11310 - RNA, 19 nt, Artificial Sequence
  Synthetic
aagaggaaauuguggauga

SEQ ID NO: 11311 - RNA, 19 nt, Artificial Sequence
  Synthetic
auguagaccaagaggaaau

SEQ ID NO: 11312 - RNA, 19 nt, Artificial Sequence
  Synthetic
guuagaaccuagauucaaa

SEQ ID NO: 11313 - RNA, 19 nt, Artificial Sequence
  Synthetic
ccagagugagcaaggauua

SEQ ID NO: 11314 - RNA, 19 nt, Artificial Sequence
  Synthetic
ccaaagcucugaauaguua

SEQ ID NO: 11315 - RNA, 19 nt, Artificial Sequence
  Synthetic
agguaugguaagagaguga

SEQ ID NO: 11316 - RNA, 19 nt, Artificial Sequence
  Synthetic
guuaguggaagcagaguua

SEQ ID NO: 11317 - RNA, 19 nt, Artificial Sequence
  Synthetic
uggaacucccauagagaaa

SEQ ID NO: 11318 - RNA, 19 nt, Artificial Sequence
  Synthetic
cugaaggacuacuuugaaa

SEQ ID NO: 11319 - RNA, 19 nt, Artificial Sequence
  Synthetic
cguagaagauauggaagaa

SEQ ID NO: 11320 - RNA, 19 nt, Artificial Sequence
  Synthetic
ggaauaggagaaagcuuaa

SEQ ID NO: 11321 - RNA, 19 nt, Artificial Sequence
  Synthetic
ggagaaaccaggaucuauu

SEQ ID NO: 11322 - RNA, 19 nt, Artificial Sequence
  Synthetic
acagaugacuggagcaaau

SEQ ID NO: 11323 - RNA, 19 nt, Artificial Sequence
  Synthetic
gaucagacacaguugguua

SEQ ID NO: 11324 - RNA, 19 nt, Artificial Sequence
  Synthetic
agacacaguugguuauuaa

SEQ ID NO: 11325 - RNA, 19 nt, Artificial Sequence
  Synthetic
cugaagaaccugaugaaaa

SEQ ID NO: 11326 - RNA, 19 nt, Artificial Sequence
  Synthetic
cagcaggaguauuggcaca

SEQ ID NO: 11327 - RNA, 19 nt, Artificial Sequence
  Synthetic
gcucacagcuuuugucaga

SEQ ID NO: 11328 - RNA, 19 nt, Artificial Sequence
  Synthetic
uaacaaaagcaguggcauu

SEQ ID NO: 11329 - RNA, 19 nt, Artificial Sequence
  Synthetic
aagucaagcagcaggagua

SEQ ID NO: 11330 - RNA, 19 nt, Artificial Sequence
  Synthetic
caucacggaucaugaauuu

SEQ ID NO: 11331 - RNA, 19 nt, Artificial Sequence
  Synthetic
cgacacaggaauugcccua

SEQ ID NO: 11332 - RNA, 19 nt, Artificial Sequence
  Synthetic
uaacauggcugaugaggca

SEQ ID NO: 11333 - RNA, 19 nt, Artificial Sequence
  Synthetic
gaugauauggcuaacuaua

SEQ ID NO: 11334 - RNA, 19 nt, Artificial Sequence
  Synthetic
gcaaaugaaucuugggugg

SEQ ID NO: 11335 - RNA, 19 nt, Artificial Sequence
  Synthetic
ggaaagugguuguacgggu

SEQ ID NO: 11336 - RNA, 19 nt, Artificial Sequence
  Synthetic
cuacagaugacuggagcaa

SEQ ID NO: 11337 - RNA, 19 nt, Artificial Sequence
  Synthetic
ugauaaauggagugaucga

SEQ ID NO: 11338 - RNA, 19 nt, Artificial Sequence
  Synthetic
gggugaagcagcugaccga

SEQ ID NO: 11339 - RNA, 19 nt, Artificial Sequence
  Synthetic
gcaaauuucggaucagaca

SEQ ID NO: 11340 - RNA, 19 nt, Artificial Sequence
  Synthetic
guguauugauaaauggagu

SEQ ID NO: 11341 - RNA, 19 nt, Artificial Sequence
  Synthetic
auugauaaauggagugauc

SEQ ID NO: 11342 - RNA, 19 nt, Artificial Sequence
  Synthetic
cuuaaugauguaacggcua

SEQ ID NO: 11343 - RNA, 19 nt, Artificial Sequence
  Synthetic
ggcaaauauuguagcuaua

SEQ ID NO: 11344 - RNA, 19 nt, Artificial Sequence
  Synthetic
gcaucggauugcaggaaua

SEQ ID NO: 11345 - RNA, 19 nt, Artificial Sequence
  Synthetic
gggaagagccugccagauu

SEQ ID NO: 11346 - RNA, 19 nt, Artificial Sequence
  Synthetic
ucaacaaggugcauauaaa

SEQ ID NO: 11347 - RNA, 19 nt, Artificial Sequence
  Synthetic
aggaauaacuguccaaauu

SEQ ID NO: 11348 - RNA, 19 nt, Artificial Sequence
  Synthetic
gcaagaucacucugagaua

SEQ ID NO: 11349 - RNA, 19 nt, Artificial Sequence
  Synthetic
gaucaaagaaggauuagaa

SEQ ID NO: 11350 - RNA, 19 nt, Artificial Sequence
  Synthetic
gaacaaaugaucuugacaa

SEQ ID NO: 11351 - RNA, 19 nt, Artificial Sequence
  Synthetic
gcgcagaugaugugcaaga

SEQ ID NO: 11352 - RNA, 19 nt, Artificial Sequence
  Synthetic
gacaagugguggugaaaca

SEQ ID NO: 11353 - RNA, 19 nt, Artificial Sequence
  Synthetic
ggauuaauaaggacacaua

SEQ ID NO: 11354 - RNA, 19 nt, Artificial Sequence
  Synthetic
gcagcaggaugcagggauu

SEQ ID NO: 11355 - RNA, 19 nt, Artificial Sequence
  Synthetic
ccacuaacacugugaugua

SEQ ID NO: 11356 - RNA, 19 nt, Artificial Sequence
  Synthetic
aggcaaauauuguagcuau

SEQ ID NO: 11357 - RNA, 19 nt, Artificial Sequence
  Synthetic
agaacgagauugagugcau

SEQ ID NO: 11358 - RNA, 19 nt, Artificial Sequence
  Synthetic
gauagggaccacagagauu

SEQ ID NO: 11359 - RNA, 19 nt, Artificial Sequence
  Synthetic
gaugagagucagagccuuu

SEQ ID NO: 11360 - RNA, 19 nt, Artificial Sequence
  Synthetic
caaaugaucuugacaacau

SEQ ID NO: 11361 - RNA, 19 nt, Artificial Sequence
  Synthetic
ggaauaacuguccaaauua

SEQ ID NO: 11362 - RNA, 19 nt, Artificial Sequence
  Synthetic
gaacccugcuugauguaaa

SEQ ID NO: 11363 - RNA, 19 nt, Artificial Sequence
  Synthetic
gcgcgcagaugaugugcaa

SEQ ID NO: 11364 - RNA, 19 nt, Artificial Sequence
  Synthetic
gggaguacccaguggagca

SEQ ID NO: 11365 - RNA, 19 nt, Artificial Sequence
  Synthetic
cuugaaacuugcuguagua

SEQ ID NO: 11366 - RNA, 19 nt, Artificial Sequence
  Synthetic
aaagagaggugcuguuuga

SEQ ID NO: 11367 - RNA, 19 nt, Artificial Sequence
  Synthetic
gcaccauguugucagagaa

SEQ ID NO: 11368 - RNA, 19 nt, Artificial Sequence
  Synthetic
aagucuacaucgagcgaga

SEQ ID NO: 11369 - RNA, 19 nt, Artificial Sequence
  Synthetic
gaaacuugcuguaguaacu

SEQ ID NO: 11370 - RNA, 19 nt, Artificial Sequence
  Synthetic
cuugaucaaagaaggauua

SEQ ID NO: 11371 - RNA, 19 nt, Artificial Sequence
  Synthetic
guguuugacuucugcauuu

SEQ ID NO: 11372 - RNA, 19 nt, Artificial Sequence
  Synthetic
gaagauuaagcgagauaua

SEQ ID NO: 11373 - RNA, 19 nt, Artificial Sequence
  Synthetic
aggaagauuaagcgagaua

SEQ ID NO: 11374 - RNA, 19 nt, Artificial Sequence
  Synthetic
agaagaagaucaugaauca

SEQ ID NO: 11375 - RNA, 19 nt, Artificial Sequence
  Synthetic
gggagaaggagaagaagau

SEQ ID NO: 11376 - RNA, 19 nt, Artificial Sequence
  Synthetic
gcaggaagauuaagcgaga

SEQ ID NO: 11377 - RNA, 19 nt, Artificial Sequence
  Synthetic
ccguaaaccuagcaagaga

SEQ ID NO: 11378 - RNA, 19 nt, Artificial Sequence
  Synthetic
caacagagacuuuugguuu

SEQ ID NO: 11379 - RNA, 19 nt, Artificial Sequence
  Synthetic
uagaggaaauggugaauau

SEQ ID NO: 11380 - RNA, 19 nt, Artificial Sequence
  Synthetic
ggcagcaaguagaggaaau

SEQ ID NO: 11381 - RNA, 19 nt, Artificial Sequence
  Synthetic
caguagugauagugaggau

SEQ ID NO: 11382 - RNA, 19 nt, Artificial Sequence
  Synthetic
gagaaggagaagaagauca

SEQ ID NO: 11383 - RNA, 19 nt, Artificial Sequence
  Synthetic
ggacgucgcaggaagauua

SEQ ID NO: 11384 - RNA, 19 nt, Artificial Sequence
  Synthetic
agaaaugggugguggcagu

SEQ ID NO: 11385 - RNA, 19 nt, Artificial Sequence
  Synthetic
aaguagaggaaauggugaa

SEQ ID NO: 11386 - RNA, 19 nt, Artificial Sequence
  Synthetic
caacacagcugaaaggagu

SEQ ID NO: 11387 - RNA, 19 nt, Artificial Sequence
  Synthetic
acaagaaauucccgaggau

SEQ ID NO: 11388 - RNA, 19 nt, Artificial Sequence
  Synthetic
cuagaaggccugauggaca

SEQ ID NO: 11389 - RNA, 19 nt, Artificial Sequence
  Synthetic
ucagaugccaguagugaua

SEQ ID NO: 11390 - RNA, 19 nt, Artificial Sequence
  Synthetic
ccuacaaacaggaaagcga

SEQ ID NO: 11391 - RNA, 19 nt, Artificial Sequence
  Synthetic
guagauggucaguuaacaa

SEQ ID NO: 11392 - RNA, 19 nt, Artificial Sequence
  Synthetic
gguauuaugaaggaagaaa

SEQ ID NO: 11393 - RNA, 19 nt, Artificial Sequence
  Synthetic
gauggacagugcacaguaa

SEQ ID NO: 11394 - RNA, 19 nt, Artificial Sequence
  Synthetic
cauugaagaaacugaauca

SEQ ID NO: 11395 - RNA, 19 nt, Artificial Sequence
  Synthetic
guucaauauaggagaaaug

SEQ ID NO: 11396 - RNA, 19 nt, Artificial Sequence
  Synthetic
gagaagaagaucaugaauc

SEQ ID NO: 11397 - RNA, 19 nt, Artificial Sequence
  Synthetic
aucaguagauggucaguua

SEQ ID NO: 11398 - RNA, 19 nt, Artificial Sequence
  Synthetic
guuaacaagcccugcaaca

SEQ ID NO: 11399 - RNA, 19 nt, Artificial Sequence
  Synthetic
agaaggagaagaagaucau

SEQ ID NO: 11400 - RNA, 19 nt, Artificial Sequence
  Synthetic
cagaagaacucaaggcagc

SEQ ID NO: 11401 - RNA, 19 nt, Artificial Sequence
  Synthetic
cuacaaacaggaaagcgaa

SEQ ID NO: 11402 - RNA, 19 nt, Artificial Sequence
  Synthetic
ggaugaggaauuagaccua

SEQ ID NO: 11403 - RNA, 19 nt, Artificial Sequence
  Synthetic
ccugaaaggcauggaaauu

SEQ ID NO: 11404 - RNA, 19 nt, Artificial Sequence
  Synthetic
gaaaggagucuaugugaca

SEQ ID NO: 11405 - RNA, 19 nt, Artificial Sequence
  Synthetic
cggaaaagccauuuggaca

SEQ ID NO: 11406 - RNA, 19 nt, Artificial Sequence
  Synthetic
gaugauaagcaaccugaaa

SEQ ID NO: 11407 - RNA, 19 nt, Artificial Sequence
  Synthetic
gggugaucaucuacaacua

SEQ ID NO: 11408 - RNA, 19 nt, Artificial Sequence
  Synthetic
caaagaaggggaugaggaa

SEQ ID NO: 11409 - RNA, 19 nt, Artificial Sequence
  Synthetic
ccacaauugccuacuuuua

SEQ ID NO: 11410 - RNA, 19 nt, Artificial Sequence
  Synthetic
gaagaaagcuauugaccag

SEQ ID NO: 11411 - RNA, 19 nt, Artificial Sequence
  Synthetic
ugaaaggcauggaaauuuu

SEQ ID NO: 11412 - RNA, 19 nt, Artificial Sequence
  Synthetic
gcgaagucaaauaaagaca

SEQ ID NO: 11413 - RNA, 19 nt, Artificial Sequence
  Synthetic
caggaggcgaagucaaaua

SEQ ID NO: 11414 - RNA, 19 nt, Artificial Sequence
  Synthetic
aagaaggggaugaggaauu

SEQ ID NO: 11415 - RNA, 19 nt, Artificial Sequence
  Synthetic
caucgaacguggaggcugu

SEQ ID NO: 11416 - RNA, 19 nt, Artificial Sequence
  Synthetic
gguacgggcaguaaaguau

SEQ ID NO: 11417 - RNA, 19 nt, Artificial Sequence
  Synthetic
ggacagcucaccugaauau

SEQ ID NO: 11418 - RNA, 19 nt, Artificial Sequence
  Synthetic
gaagucaaauaaagacaga

SEQ ID NO: 11419 - RNA, 19 nt, Artificial Sequence
  Synthetic
gaguggaguguucgggaau

SEQ ID NO: 11420 - RNA, 19 nt, Artificial Sequence
  Synthetic
acagaugugaagaaagcua

SEQ ID NO: 11421 - RNA, 19 nt, Artificial Sequence
  Synthetic
aggcgaagucaaauaaaga

SEQ ID NO: 11422 - RNA, 19 nt, Artificial Sequence
  Synthetic
cagcagagaagggagcaaa

SEQ ID NO: 11423 - RNA, 19 nt, Artificial Sequence
  Synthetic
uaaagacagaugugaagaa

SEQ ID NO: 11424 - RNA, 19 nt, Artificial Sequence
  Synthetic
agacagaugugaagaaagc

SEQ ID NO: 11425 - RNA, 19 nt, Artificial Sequence
  Synthetic
cguggaggcuguacuuuua

SEQ ID NO: 11426 - RNA, 19 nt, Artificial Sequence
  Synthetic
agaccuaaaugaagacaac

SEQ ID NO: 11427 - RNA, 19 nt, Artificial Sequence
  Synthetic
aggagagaguggaguguuc

SEQ ID NO: 11428 - RNA, 19 nt, Artificial Sequence
  Synthetic
aaagacagaugugaagaaa

SEQ ID NO: 11429 - RNA, 19 nt, Artificial Sequence
  Synthetic
gcaguaaaguauuucccau

SEQ ID NO: 11430 - RNA, 19 nt, Artificial Sequence
  Synthetic
ccaagauguaguacgcauu

SEQ ID NO: 11431 - RNA, 19 nt, Artificial Sequence
  Synthetic
agaguggaguguucgggaa

SEQ ID NO: 11432 - RNA, 19 nt, Artificial Sequence
  Synthetic
caucaaagcccuaggauau

SEQ ID NO: 11433 - RNA, 19 nt, Artificial Sequence
  Synthetic
uaaaggagaugcaggagaa

SEQ ID NO: 11434 - RNA, 19 nt, Artificial Sequence
  Synthetic
caggaaauauaguggucau

SEQ ID NO: 11435 - RNA, 19 nt, Artificial Sequence
  Synthetic
ucaucaaagcccuaggaua

SEQ ID NO: 11436 - RNA, 19 nt, Artificial Sequence
  Synthetic
uccaaaaggaagagaaauu

SEQ ID NO: 11437 - RNA, 19 nt, Artificial Sequence
  Synthetic
ucuacaaugaggagcgcua

SEQ ID NO: 11438 - RNA, 19 nt, Artificial Sequence
  Synthetic
acuguaaagcauggagaaa

SEQ ID NO: 11439 - RNA, 19 nt, Artificial Sequence
  Synthetic
cuaagaaaguuauuggcca

SEQ ID NO: 11440 - RNA, 19 nt, Artificial Sequence
  Synthetic
gaauugauguugaugcuga

SEQ ID NO: 11441 - RNA, 19 nt, Artificial Sequence
  Synthetic
aggagaugcaggagaaaau

SEQ ID NO: 11442 - RNA, 19 nt, Artificial Sequence
  Synthetic
auuggaagucagagccaua

SEQ ID NO: 11443 - RNA, 19 nt, Artificial Sequence
  Synthetic
gggaauugauguugaugcu

SEQ ID NO: 11444 - RNA, 19 nt, Artificial Sequence
  Synthetic
cuuuaaaggagaugcagga

SEQ ID NO: 11445 - RNA, 19 nt, Artificial Sequence
  Synthetic
gagucuagcuuuaccagau

SEQ ID NO: 11446 - RNA, 19 nt, Artificial Sequence
  Synthetic
gcuagaagccggcaggagu

SEQ ID NO: 11447 - RNA, 19 nt, Artificial Sequence
  Synthetic
ggaaauauaguggucauua

SEQ ID NO: 11448 - RNA, 19 nt, Artificial Sequence
  Synthetic
uauccaaaaggaagagaaa

SEQ ID NO: 11449 - RNA, 19 nt, Artificial Sequence
  Synthetic
ugguaaacaucgaguacgu

SEQ ID NO: 11450 - RNA, 19 nt, Artificial Sequence
  Synthetic
caugaugauuaucucguua

SEQ ID NO: 11451 - RNA, 19 nt, Artificial Sequence
  Synthetic
cuguaaagcauggagaaaa

SEQ ID NO: 11452 - RNA, 19 nt, Artificial Sequence
  Synthetic
cgcgggaacaggaaauaua

SEQ ID NO: 11453 - RNA, 19 nt, Artificial Sequence
  Synthetic
cagugugaucccagcuuua

SEQ ID NO: 11454 - RNA, 19 nt, Artificial Sequence
  Synthetic
cugcugaaucugagccaca

SEQ ID NO: 11455 - RNA, 19 nt, Artificial Sequence
  Synthetic
gaagucagagccauagaaa

SEQ ID NO: 11456 - RNA, 19 nt, Artificial Sequence
  Synthetic
acuucauacuguaaagcau

SEQ ID NO: 11457 - RNA, 19 nt, Artificial Sequence
  Synthetic
gaaaguuauuggccagcuu

SEQ ID NO: 11458 - RNA, 19 nt, Artificial Sequence
  Synthetic
uguguaaacuugaugucau

SEQ ID NO: 11459 - RNA, 19 nt, Artificial Sequence
  Synthetic
acguggacccgcagaccaa

SEQ ID NO: 11460 - RNA, 19 nt, Artificial Sequence
  Synthetic
uagaauaugcauugaccca

SEQ ID NO: 11461 - RNA, 19 nt, Artificial Sequence
  Synthetic
gaagggauccagcugcaaa

SEQ ID NO: 11462 - RNA, 19 nt, Artificial Sequence
  Synthetic
gcaaagaucucugcaauaa

SEQ ID NO: 11463 - RNA, 19 nt, Artificial Sequence
  Synthetic
caucucaagccaagggaaa

SEQ ID NO: 11464 - RNA, 19 nt, Artificial Sequence
  Synthetic
ggacugugaagaagugaaa

SEQ ID NO: 11465 - RNA, 19 nt, Artificial Sequence
  Synthetic
caggaaaacaagagaaaga

SEQ ID NO: 11466 - RNA, 19 nt, Artificial Sequence
  Synthetic
gaugaagcauuuagaacau

SEQ ID NO: 11467 - RNA, 19 nt, Artificial Sequence
  Synthetic
ccgagaaggaggaauggua

SEQ ID NO: 11468 - RNA, 19 nt, Artificial Sequence
  Synthetic
gaacauucuuaaagcccua

SEQ ID NO: 11469 - RNA, 19 nt, Artificial Sequence
  Synthetic
ccaagaaagcccacucaaa

SEQ ID NO: 11470 - RNA, 19 nt, Artificial Sequence
  Synthetic
ggaaggaccucaauaccaa

SEQ ID NO: 11471 - RNA, 19 nt, Artificial Sequence
  Synthetic
cggcaguacuuccagcaaa

SEQ ID NO: 11472 - RNA, 19 nt, Artificial Sequence
  Synthetic
cauaaugauuccugagcca

SEQ ID NO: 11473 - RNA, 19 nt, Artificial Sequence
  Synthetic
ucuuaaagcccuagggauc

SEQ ID NO: 11474 - RNA, 19 nt, Artificial Sequence
  Synthetic
aagcaaagaucucugcaau

SEQ ID NO: 11475 - RNA, 19 nt, Artificial Sequence
  Synthetic
gagcaauugaugaagcauu

SEQ ID NO: 11476 - RNA, 19 nt, Artificial Sequence
  Synthetic
ugaccaggacugugaagaa

SEQ ID NO: 11477 - RNA, 19 nt, Artificial Sequence
  Synthetic
aagcagugauucugacauu

SEQ ID NO: 11478 - RNA, 19 nt, Artificial Sequence
  Synthetic
agcaaagaucucugcaaua

SEQ ID NO: 11479 - RNA, 19 nt, Artificial Sequence
  Synthetic
aagccaagggaaaggauau

SEQ ID NO: 11480 - RNA, 19 nt, Artificial Sequence
  Synthetic
uagaagacaucguggccau

SEQ ID NO: 11481 - RNA, 19 nt, Artificial Sequence
  Synthetic
uaugcaaaugccagggaua

SEQ ID NO: 11482 - RNA, 19 nt, Artificial Sequence
  Synthetic
ggaaggagauaguaagccu

SEQ ID NO: 11483 - RNA, 19 nt, Artificial Sequence
  Synthetic
ggaccaucaagaaggguga

SEQ ID NO: 11484 - RNA, 19 nt, Artificial Sequence
  Synthetic
ggaaaacaagagaaagaau

SEQ ID NO: 11485 - RNA, 19 nt, Artificial Sequence
  Synthetic
ugaugaagcauuuagaaca

SEQ ID NO: 11486 - RNA, 19 nt, Artificial Sequence
  Synthetic
gagaaggaggaaugguaca

SEQ ID NO: 11487 - RNA, 19 nt, Artificial Sequence
  Synthetic
ggcacauacauuugcuaaa

SEQ ID NO: 11488 - RNA, 19 nt, Artificial Sequence
  Synthetic
uacuaacauuggagguuua

SEQ ID NO: 11489 - RNA, 19 nt, Artificial Sequence
  Synthetic
caguuuguauugaagggua

SEQ ID NO: 11490 - RNA, 19 nt, Artificial Sequence
  Synthetic
ugacaaggaaacagagucu

SEQ ID NO: 11491 - RNA, 19 nt, Artificial Sequence
  Synthetic
caucaaacuucccagcaau

SEQ ID NO: 11492 - RNA, 19 nt, Artificial Sequence
  Synthetic
ucaucaaacuucccagcaa

SEQ ID NO: 11493 - RNA, 19 nt, Artificial Sequence
  Synthetic
gcacugaagaggagggaga

SEQ ID NO: 11494 - RNA, 19 nt, Artificial Sequence
  Synthetic
gugagaaacuggauaagaa

SEQ ID NO: 11495 - RNA, 19 nt, Artificial Sequence
  Synthetic
cagcaaaaguaaaggguga

SEQ ID NO: 11496 - RNA, 19 nt, Artificial Sequence
  Synthetic
gcgugaaagcacuggacaa

SEQ ID NO: 11497 - RNA, 19 nt, Artificial Sequence
  Synthetic
cugaagacgaagugaguga

SEQ ID NO: 11498 - RNA, 19 nt, Artificial Sequence
  Synthetic
cauuggagguggaggagga

SEQ ID NO: 11499 - RNA, 19 nt, Artificial Sequence
  Synthetic
aaguaaagggugagaaacu

SEQ ID NO: 11500 - RNA, 19 nt, Artificial Sequence
  Synthetic
gggcagauucccuggccaa

SEQ ID NO: 11501 - RNA, 19 nt, Artificial Sequence
  Synthetic
acagcaaagcagagaauca

SEQ ID NO: 11502 - RNA, 19 nt, Artificial Sequence
  Synthetic
agcaggaugcagagggaaa

SEQ ID NO: 11503 - RNA, 19 nt, Artificial Sequence
  Synthetic
gcguggaggagguggacau

SEQ ID NO: 11504 - RNA, 19 nt, Artificial Sequence
  Synthetic
gcauaaaggaggaagacac

SEQ ID NO: 11505 - RNA, 19 nt, Artificial Sequence
  Synthetic
agugaagagcccuggagaa

SEQ ID NO: 11506 - RNA, 19 nt, Artificial Sequence
  Synthetic
agggugagaaacuggauaa

SEQ ID NO: 11507 - RNA, 19 nt, Artificial Sequence
  Synthetic
gaacauagcaagagcauua

SEQ ID NO: 11508 - RNA, 19 nt, Artificial Sequence
  Synthetic
ggaaagagaaagaguuaua

SEQ ID NO: 11509 - RNA, 19 nt, Artificial Sequence
  Synthetic
ccaaaguacuggagaagaa

SEQ ID NO: 11510 - RNA, 19 nt, Artificial Sequence
  Synthetic
ggaacuaggugcaagaaua

SEQ ID NO: 11511 - RNA, 19 nt, Artificial Sequence
  Synthetic
gaggaaagagaaagaguua

SEQ ID NO: 11512 - RNA, 19 nt, Artificial Sequence
  Synthetic
ggaaaguucugcagagcua

SEQ ID NO: 11513 - RNA, 19 nt, Artificial Sequence
  Synthetic
uuauagaaguuguggagaa

SEQ ID NO: 11514 - RNA, 19 nt, Artificial Sequence
  Synthetic
ccaauagaggguagaaaua

SEQ ID NO: 11515 - RNA, 19 nt, Artificial Sequence
  Synthetic
agaagaaggugaaugaauu

SEQ ID NO: 11516 - RNA, 19 nt, Artificial Sequence
  Synthetic
ccaugaaguugcacuaaua

SEQ ID NO: 11517 - RNA, 19 nt, Artificial Sequence
  Synthetic
gagaagaaggugaaugaau

SEQ ID NO: 11518 - RNA, 19 nt, Artificial Sequence
  Synthetic
ggaauguggugucgaggaa

SEQ ID NO: 11519 - RNA, 19 nt, Artificial Sequence
  Synthetic
acgauagaggaaagagaaa

SEQ ID NO: 11520 - RNA, 19 nt, Artificial Sequence
  Synthetic
acgccaaaguacuggagaa

SEQ ID NO: 11521 - RNA, 19 nt, Artificial Sequence
  Synthetic
gaagaaugcaccacaauua

SEQ ID NO: 11522 - RNA, 19 nt, Artificial Sequence
  Synthetic
gaagcaaacgauagaggaa

SEQ ID NO: 11523 - RNA, 19 nt, Artificial Sequence
  Synthetic
caacaauaugggaaagauu

SEQ ID NO: 11524 - RNA, 19 nt, Artificial Sequence
  Synthetic
agaggaagcuaaaguggaa

SEQ ID NO: 11525 - RNA, 19 nt, Artificial Sequence
  Synthetic
cuguaauguuggacacuaa

SEQ ID NO: 11526 - RNA, 19 nt, Artificial Sequence
  Synthetic
aagcuacauugaagagaaa

SEQ ID NO: 11527 - RNA, 19 nt, Artificial Sequence
  Synthetic
gaacacaugcagaagcaaa

SEQ ID NO: 11528 - RNA, 19 nt, Artificial Sequence
  Synthetic
gauagaggaaagagaaaga

SEQ ID NO: 11529 - RNA, 19 nt, Artificial Sequence
  Synthetic
cacuaauacugcagaagaa

SEQ ID NO: 11530 - RNA, 19 nt, Artificial Sequence
  Synthetic
agaagaagauggugugcuu

SEQ ID NO: 11531 - RNA, 19 nt, Artificial Sequence
  Synthetic
cuggauauauuaaggaaga

SEQ ID NO: 11532 - RNA, 19 nt, Artificial Sequence
  Synthetic
uagaaguuguggagaaaca

SEQ ID NO: 11533 - RNA, 19 nt, Artificial Sequence
  Synthetic
uauagaaguuguggagaaa

SEQ ID NO: 11534 - RNA, 19 nt, Artificial Sequence
  Synthetic
gaacuaugcuuguuaauga

SEQ ID NO: 11535 - RNA, 19 nt, Artificial Sequence
  Synthetic
agaagaaauugaugaagca

SEQ ID NO: 11536 - RNA, 19 nt, Artificial Sequence
  Synthetic
ccuaagacgauaaagaauu

SEQ ID NO: 11537 - RNA, 19 nt, Artificial Sequence
  Synthetic
ggagaagcuuuuacagaaa

SEQ ID NO: 11538 - RNA, 19 nt, Artificial Sequence
  Synthetic
augagaagauagauggaaa

SEQ ID NO: 11539 - RNA, 19 nt, Artificial Sequence
  Synthetic
gggagaagcuuuuacagaa

SEQ ID NO: 11540 - RNA, 19 nt, Artificial Sequence
  Synthetic
augcagucuuugugggaaa

SEQ ID NO: 11541 - RNA, 19 nt, Artificial Sequence
  Synthetic
gagaagaaucagaaugaga

SEQ ID NO: 11542 - RNA, 19 nt, Artificial Sequence
  Synthetic
ggaaggauuaugugaauuu

SEQ ID NO: 11543 - RNA, 19 nt, Artificial Sequence
  Synthetic
gagugaagucucaaugaua

SEQ ID NO: 11544 - RNA, 19 nt, Artificial Sequence
  Synthetic
aggcuaagacugugagcuu

SEQ ID NO: 11545 - RNA, 19 nt, Artificial Sequence
  Synthetic
aaucaaagcucccuaauau

SEQ ID NO: 11546 - RNA, 19 nt, Artificial Sequence
  Synthetic
agugaagucucaaugauaa

SEQ ID NO: 11547 - RNA, 19 nt, Artificial Sequence
  Synthetic
gaacgaaaugugccauaaa

SEQ ID NO: 11548 - RNA, 19 nt, Artificial Sequence
  Synthetic
gaagaagccaacaaugaua

SEQ ID NO: 11549 - RNA, 19 nt, Artificial Sequence
  Synthetic
auuuaaggcuagaagcaau

SEQ ID NO: 11550 - RNA, 19 nt, Artificial Sequence
  Synthetic
ccuauugacuuuaaaccaa

SEQ ID NO: 11551 - RNA, 19 nt, Artificial Sequence
  Synthetic
cuggaaggauuaugugaau

SEQ ID NO: 11552 - RNA, 19 nt, Artificial Sequence
  Synthetic
auggagauuuuaagaggaa

SEQ ID NO: 11553 - RNA, 19 nt, Artificial Sequence
  Synthetic
ccacuuaugcugcaauaua

SEQ ID NO: 11554 - RNA, 19 nt, Artificial Sequence
  Synthetic
gaauguaugaggagcugaa

SEQ ID NO: 11555 - RNA, 19 nt, Artificial Sequence
  Synthetic
gaauuuaaggcuagaagca

SEQ ID NO: 11556 - RNA, 19 nt, Artificial Sequence
  Synthetic
gcacucacagggagacaaa

SEQ ID NO: 11557 - RNA, 19 nt, Artificial Sequence
  Synthetic
gcucauaggauggagauuu

SEQ ID NO: 11558 - RNA, 19 nt, Artificial Sequence
  Synthetic
ugaaugagcuucugaccuu

SEQ ID NO: 11559 - RNA, 19 nt, Artificial Sequence
  Synthetic
agauaaaccucaaaaccaa

SEQ ID NO: 11560 - RNA, 19 nt, Artificial Sequence
  Synthetic
caauuagagcugaguauca

SEQ ID NO: 11561 - RNA, 19 nt, Artificial Sequence
  Synthetic
augaggagcugaacgaaau

SEQ ID NO: 11562 - RNA, 19 nt, Artificial Sequence
  Synthetic
agaagaaucagaaugagaa

SEQ ID NO: 11563 - RNA, 19 nt, Artificial Sequence
  Synthetic
augaagaagccaacaauga

SEQ ID NO: 11564 - RNA, 19 nt, Artificial Sequence
  Synthetic
uaugaggagcugaacgaaa

SEQ ID NO: 11565 - RNA, 19 nt, Artificial Sequence
  Synthetic
gcacauacuuagauagaaa

SEQ ID NO: 11566 - RNA, 19 nt, Artificial Sequence
  Synthetic
cauaaaugcugcagaauaa

SEQ ID NO: 11567 - RNA, 19 nt, Artificial Sequence
  Synthetic
cgagacaaccugagugaaa

SEQ ID NO: 11568 - RNA, 19 nt, Artificial Sequence
  Synthetic
gcaaguagauauugaguca

SEQ ID NO: 11569 - RNA, 19 nt, Artificial Sequence
  Synthetic
gggaacaguuagugauaau

SEQ ID NO: 11570 - RNA, 19 nt, Artificial Sequence
  Synthetic
agacagauuuccugauaua

SEQ ID NO: 11571 - RNA, 19 nt, Artificial Sequence
  Synthetic
ggauaagugguuagugaua

SEQ ID NO: 11572 - RNA, 19 nt, Artificial Sequence
  Synthetic
ccauaaaugcugcagaaua

SEQ ID NO: 11573 - RNA, 19 nt, Artificial Sequence
  Synthetic
caacaaagcacgaacucaa

SEQ ID NO: 11574 - RNA, 19 nt, Artificial Sequence
  Synthetic
gaugaugucuugauggaaa

SEQ ID NO: 11575 - RNA, 19 nt, Artificial Sequence
  Synthetic
gaagaaaacuugaggcuuu

SEQ ID NO: 11576 - RNA, 19 nt, Artificial Sequence
  Synthetic
gcaaauggguucagaucga

SEQ ID NO: 11577 - RNA, 19 nt, Artificial Sequence
  Synthetic
aagcagauguacagaaaga

SEQ ID NO: 11578 - RNA, 19 nt, Artificial Sequence
  Synthetic
cuacuuaaguuucagguua

SEQ ID NO: 11579 - RNA, 19 nt, Artificial Sequence
  Synthetic
ugaaaccacuaaagagaua

SEQ ID NO: 11580 - RNA, 19 nt, Artificial Sequence
  Synthetic
aggguaacaugaagauaaa

SEQ ID NO: 11581 - RNA, 19 nt, Artificial Sequence
  Synthetic
ccacaucaguguagcauuu

SEQ ID NO: 11582 - RNA, 19 nt, Artificial Sequence
  Synthetic
gaaggaaccaaguaggaua

SEQ ID NO: 11583 - RNA, 19 nt, Artificial Sequence
  Synthetic
ggauugaauuugaugauga

SEQ ID NO: 11584 - RNA, 19 nt, Artificial Sequence
  Synthetic
agaagcaacagcagggaaa

SEQ ID NO: 11585 - RNA, 19 nt, Artificial Sequence
  Synthetic
acaagcagauguacagaaa

SEQ ID NO: 11586 - RNA, 19 nt, Artificial Sequence
  Synthetic
cgacaauauuuaaggauag

SEQ ID NO: 11587 - RNA, 19 nt, Artificial Sequence
  Synthetic
gaaucauauugcugaagaa

SEQ ID NO: 11588 - RNA, 19 nt, Artificial Sequence
  Synthetic
ggccauagcagguggugua

SEQ ID NO: 11589 - RNA, 19 nt, Artificial Sequence
  Synthetic
gguguaacguugucuguaa

SEQ ID NO: 11590 - RNA, 19 nt, Artificial Sequence
  Synthetic
gcgagagggcuguggaaca

SEQ ID NO: 11591 - RNA, 19 nt, Artificial Sequence
  Synthetic
ucauauugcugaagaacau

SEQ ID NO: 11592 - RNA, 19 nt, Artificial Sequence
  Synthetic
ccauguaugauuagcauua

SEQ ID NO: 11593 - RNA, 19 nt, Artificial Sequence
  Synthetic
agucaugguuccagugauu

SEQ ID NO: 11594 - RNA, 19 nt, Artificial Sequence
  Synthetic
aaugaagggcuguguguaa

SEQ ID NO: 11595 - RNA, 19 nt, Artificial Sequence
  Synthetic
ggaauuggucagugagaaa

SEQ ID NO: 11596 - RNA, 19 nt, Artificial Sequence
  Synthetic
gagaaauacuggaaaguga

SEQ ID NO: 11597 - RNA, 19 nt, Artificial Sequence
  Synthetic
ggcuagagcuugauaauaa

SEQ ID NO: 11598 - RNA, 19 nt, Artificial Sequence
  Synthetic
ccacauaaguuucaagaau

SEQ ID NO: 11599 - RNA, 19 nt, Artificial Sequence
  Synthetic
gagguuagcuuuagaagaa

SEQ ID NO: 11600 - RNA, 19 nt, Artificial Sequence
  Synthetic
ggauggugcuagugaaauu

SEQ ID NO: 11601 - RNA, 19 nt, Artificial Sequence
  Synthetic
ccuuagaaguggcaacaaa

SEQ ID NO: 11602 - RNA, 19 nt, Artificial Sequence
  Synthetic
ggcaauaacagauggcuua

SEQ ID NO: 11603 - RNA, 19 nt, Artificial Sequence
  Synthetic
gcacacagaacaauggaaa

SEQ ID NO: 11604 - RNA, 19 nt, Artificial Sequence
  Synthetic
gcaagaaacaacagauuga

SEQ ID NO: 11605 - RNA, 19 nt, Artificial Sequence
  Synthetic
cagagauaauggagauauu

SEQ ID NO: 11606 - RNA, 19 nt, Artificial Sequence
  Synthetic
acauaaagacuucugguaa

SEQ ID NO: 11607 - RNA, 19 nt, Artificial Sequence
  Synthetic
gcacagacgagauacauaa

SEQ ID NO: 11608 - RNA, 19 nt, Artificial Sequence
  Synthetic
aggaaggacugaagauaca

SEQ ID NO: 11609 - RNA, 19 nt, Artificial Sequence
  Synthetic
gagcagaagauaaugguga

SEQ ID NO: 11610 - RNA, 19 nt, Artificial Sequence
  Synthetic
ggaucaacaagcacaauaa

SEQ ID NO: 11611 - RNA, 19 nt, Artificial Sequence
  Synthetic
aaacggaacucaaccauua

SEQ ID NO: 11612 - RNA, 19 nt, Artificial Sequence
  Synthetic
gagaguuauuugugacuau

SEQ ID NO: 11613 - RNA, 19 nt, Artificial Sequence
  Synthetic
ggagauauuuugcacuuua

SEQ ID NO: 11614 - RNA, 19 nt, Artificial Sequence
  Synthetic
caagauauguucaaagcuu

SEQ ID NO: 11615 - RNA, 19 nt, Artificial Sequence
  Synthetic
ucaucaagagagaguauua

SEQ ID NO: 11616 - RNA, 19 nt, Artificial Sequence
  Synthetic
gcucaucaagagagaguau

SEQ ID NO: 11617 - RNA, 19 nt, Artificial Sequence
  Synthetic
aaaugguaguggagcagaa

SEQ ID NO: 11618 - RNA, 19 nt, Artificial Sequence
  Synthetic
guucaaagcuucccuaauu

SEQ ID NO: 11619 - RNA, 19 nt, Artificial Sequence
  Synthetic
guuuggauauguugaagaa

SEQ ID NO: 11620 - RNA, 19 nt, Artificial Sequence
  Synthetic
uuauggagaucuuggauau

SEQ ID NO: 11621 - RNA, 19 nt, Artificial Sequence
  Synthetic
aguaaugcauccacacaua

SEQ ID NO: 11622 - RNA, 19 nt, Artificial Sequence
  Synthetic
aagucuacacagugaauua

SEQ ID NO: 11623 - RNA, 19 nt, Artificial Sequence
  Synthetic
uuaaagauguacuggcauu

SEQ ID NO: 11624 - RNA, 19 nt, Artificial Sequence
  Synthetic
cauaaagacuucugguaac

SEQ ID NO: 11625 - RNA, 19 nt, Artificial Sequence
  Synthetic
uggaagagauuaaggauua

SEQ ID NO: 11626 - RNA, 19 nt, Artificial Sequence
  Synthetic
ggacugagcuggugaagaa

SEQ ID NO: 11627 - RNA, 19 nt, Artificial Sequence
  Synthetic
ggauaaagagaaaggcaaa

SEQ ID NO: 11628 - RNA, 19 nt, Artificial Sequence
  Synthetic
augcagagcuugaggagaa

SEQ ID NO: 11629 - RNA, 19 nt, Artificial Sequence
  Synthetic
gcuaaacaguggagauaau

SEQ ID NO: 11630 - RNA, 19 nt, Artificial Sequence
  Synthetic
ggaaaugaaugcagagcuu

SEQ ID NO: 11631 - RNA, 19 nt, Artificial Sequence
  Synthetic
gagagaacuuggugagcua

SEQ ID NO: 11632 - RNA, 19 nt, Artificial Sequence
  Synthetic
gaaauuaugucuaggauga

SEQ ID NO: 11633 - RNA, 19 nt, Artificial Sequence
  Synthetic
gggagaaggaugaugcaaa

SEQ ID NO: 11634 - RNA, 19 nt, Artificial Sequence
  Synthetic
gcaaaugucccaaguguaa

SEQ ID NO: 11635 - RNA, 19 nt, Artificial Sequence
  Synthetic
ccaaaggaacagagagaca

SEQ ID NO: 11636 - RNA, 19 nt, Artificial Sequence
  Synthetic
gagagaagcagaagcuaaa

SEQ ID NO: 11637 - RNA, 19 nt, Artificial Sequence
  Synthetic
uagaauaccuacagaagaa

SEQ ID NO: 11638 - RNA, 19 nt, Artificial Sequence
  Synthetic
cgagagaagcagaagcuaa

SEQ ID NO: 11639 - RNA, 19 nt, Artificial Sequence
  Synthetic
ucuccaaguugcagaguaa

SEQ ID NO: 11640 - RNA, 19 nt, Artificial Sequence
  Synthetic
aggaugagaucguggagaa

SEQ ID NO: 11641 - RNA, 19 nt, Artificial Sequence
  Synthetic
ccaaugaaaucaagucuaa

SEQ ID NO: 11642 - RNA, 19 nt, Artificial Sequence
  Synthetic
ggagaaggaugaugcaaau

SEQ ID NO: 11643 - RNA, 19 nt, Artificial Sequence
  Synthetic
gauaaagagaagaaagaga

SEQ ID NO: 11644 - RNA, 19 nt, Artificial Sequence
  Synthetic
gaggaugccuugaggaaga

SEQ ID NO: 11645 - RNA, 19 nt, Artificial Sequence
  Synthetic
ugcuaaggauaaagagaaa

SEQ ID NO: 11646 - RNA, 19 nt, Artificial Sequence
  Synthetic
aagagaagaaagagaacaa

SEQ ID NO: 11647 - RNA, 19 nt, Artificial Sequence
  Synthetic
acaugaugauggacggaaa

SEQ ID NO: 11648 - RNA, 19 nt, Artificial Sequence
  Synthetic
gagcaagucguuaaggaaa

SEQ ID NO: 11649 - RNA, 19 nt, Artificial Sequence
  Synthetic
ggagagggaacgagaaaga

SEQ ID NO: 11650 - RNA, 19 nt, Artificial Sequence
  Synthetic
uggcagaaauguuggauca

SEQ ID NO: 11651 - RNA, 19 nt, Artificial Sequence
  Synthetic
gaagaaagagaacaagaaa

SEQ ID NO: 11652 - RNA, 19 nt, Artificial Sequence
  Synthetic
uggaagauaaagagaagaa

SEQ ID NO: 11653 - RNA, 19 nt, Artificial Sequence
  Synthetic
uaaggaaacuccagaauau

SEQ ID NO: 11654 - RNA, 19 nt, Artificial Sequence
  Synthetic
gaacgagaaaggagggaga

SEQ ID NO: 11655 - RNA, 19 nt, Artificial Sequence
  Synthetic
gggcagagaacauuguaua

SEQ ID NO: 11656 - RNA, 19 nt, Artificial Sequence
  Synthetic
cgagagaagaggaguggau

SEQ ID NO: 11657 - RNA, 19 nt, Artificial Sequence
  Synthetic
ggguaaagaagggaacuaa

SEQ ID NO: 11658 - RNA, 19 nt, Artificial Sequence
  Synthetic
caugagaugcgcuuggaaa

SEQ ID NO: 11659 - RNA, 19 nt, Artificial Sequence
  Synthetic
uggaugagccugcggguuu

SEQ ID NO: 11660 - RNA, 19 nt, Artificial Sequence
  Synthetic
ccuacaaacagguuauauu

SEQ ID NO: 11661 - RNA, 19 nt, Artificial Sequence
  Synthetic
ggaaaggccuagucagaag

SEQ ID NO: 11662 - RNA, 19 nt, Artificial Sequence
  Synthetic
caucaagcacacaaagaau

SEQ ID NO: 11663 - RNA, 19 nt, Artificial Sequence
  Synthetic
guaaagaagggaacuaaga

SEQ ID NO: 11664 - RNA, 19 nt, Artificial Sequence
  Synthetic
acagaaagugccuuauuaa

SEQ ID NO: 11665 - RNA, 19 nt, Artificial Sequence
  Synthetic
gcuaagacaucaagcacac

SEQ ID NO: 11666 - RNA, 19 nt, Artificial Sequence
  Synthetic
uggcccaguugcacaguaa

SEQ ID NO: 11667 - RNA, 19 nt, Artificial Sequence
  Synthetic
gaaucugccucucaacaua

SEQ ID NO: 11668 - RNA, 19 nt, Artificial Sequence
  Synthetic
uguuguaugccuuugauaa

SEQ ID NO: 11669 - RNA, 19 nt, Artificial Sequence
  Synthetic
agagaacauuguauagcuu

SEQ ID NO: 11670 - RNA, 19 nt, Artificial Sequence
  Synthetic
cagccaaacugggaaccua

SEQ ID NO: 11671 - RNA, 19 nt, Artificial Sequence
  Synthetic
gcucggauuucccacauua

SEQ ID NO: 11672 - RNA, 19 nt, Artificial Sequence
  Synthetic
acaucaagcacacaaagaa

SEQ ID NO: 11673 - RNA, 19 nt, Artificial Sequence
  Synthetic
cacagaaagugccuuauua

SEQ ID NO: 11674 - RNA, 19 nt, Artificial Sequence
  Synthetic
cgagaugaguuggggauuu

SEQ ID NO: 11675 - RNA, 19 nt, Artificial Sequence
  Synthetic
cagugugccuagaagacuu

SEQ ID NO: 11676 - RNA, 19 nt, Artificial Sequence
  Synthetic
ccacagaaagugccuuauu

SEQ ID NO: 11677 - RNA, 19 nt, Artificial Sequence
  Synthetic
gagaacauuguauagcuua

SEQ ID NO: 11678 - RNA, 19 nt, Artificial Sequence
  Synthetic
gcaacaugccaguucuaca

SEQ ID NO: 11679 - RNA, 19 nt, Artificial Sequence
  Synthetic
ucaaaucaucuaagcugaa

SEQ ID NO: 11680 - RNA, 19 nt, Artificial Sequence
  Synthetic
caugagggucucuuacuaa

SEQ ID NO: 11681 - RNA, 19 nt, Artificial Sequence
  Synthetic
ucaagcacacaaagaauuu

SEQ ID NO: 11682 - RNA, 19 nt, Artificial Sequence
  Synthetic
uagcuuaccgcaaggauca

SEQ ID NO: 11683 - RNA, 19 nt, Artificial Sequence
  Synthetic
cuucaagccucgagaugag

SEQ ID NO: 11684 - RNA, 19 nt, Artificial Sequence
  Synthetic
caagcaggaggguaaagaa

SEQ ID NO: 11685 - RNA, 19 nt, Artificial Sequence
  Synthetic
cagcaaagguugggcgaaa

SEQ ID NO: 11686 - RNA, 19 nt, Artificial Sequence
  Synthetic
gauuaaaggaaauggcaga

SEQ ID NO: 11687 - RNA, 19 nt, Artificial Sequence
  Synthetic
ccucugaaguugaaguauu

SEQ ID NO: 11688 - RNA, 19 nt, Artificial Sequence
  Synthetic
aggaaauucucacagauaa

SEQ ID NO: 11689 - RNA, 19 nt, Artificial Sequence
  Synthetic
ggcgaaacccagaaagcua

SEQ ID NO: 11690 - RNA, 19 nt, Artificial Sequence
  Synthetic
ggaccaggauucacaguau

SEQ ID NO: 11691 - RNA, 19 nt, Artificial Sequence
  Synthetic
gagggaggcaauaaagaua

SEQ ID NO: 11692 - RNA, 19 nt, Artificial Sequence
  Synthetic
ggucaaaucagcaaagguu

SEQ ID NO: 11693 - RNA, 19 nt, Artificial Sequence
  Synthetic
agcaagagcugaaggcaca

SEQ ID NO: 11694 - RNA, 19 nt, Artificial Sequence
  Synthetic
auugagaaagggaaggaaa

SEQ ID NO: 11695 - RNA, 19 nt, Artificial Sequence
  Synthetic
aaggaaauucucacagaua

SEQ ID NO: 11696 - RNA, 19 nt, Artificial Sequence
  Synthetic
ccucauggccaguguguca

SEQ ID NO: 11697 - RNA, 19 nt, Artificial Sequence
  Synthetic
ccacagaucucuauccgaa

SEQ ID NO: 11698 - RNA, 19 nt, Artificial Sequence
  Synthetic
ggaaggaaauucucacaga

SEQ ID NO: 11699 - RNA, 19 nt, Artificial Sequence
  Synthetic
uugagaaagggaaggaaau

SEQ ID NO: 11700 - RNA, 19 nt, Artificial Sequence
  Synthetic
accuugaggcugagcgaaa

SEQ ID NO: 11701 - RNA, 19 nt, Artificial Sequence
  Synthetic
acaggugauuaaaggaaau

SEQ ID NO: 11702 - RNA, 19 nt, Artificial Sequence
  Synthetic
ucauugaccuugaggcuga

SEQ ID NO: 11703 - RNA, 19 nt, Artificial Sequence
  Synthetic
gcagcaugcuacaaccaaa

SEQ ID NO: 11704 - RNA, 19 nt, Artificial Sequence
  Synthetic
augaacuacaggugauuaa

SEQ ID NO: 11705 - RNA, 19 nt, Artificial Sequence
  Synthetic
acauggagcaagagcugaa

SEQ ID NO: 11706 - RNA, 19 nt, Artificial Sequence
  Synthetic
aguugaagguccuccacaa

SEQ ID NO: 11707 - RNA, 19 nt, Artificial Sequence
  Synthetic
cuacaggugauuaaaggaa

SEQ ID NO: 11708 - RNA, 19 nt, Artificial Sequence
  Synthetic
ccauggaccuaaagccaga

SEQ ID NO: 11709 - RNA, 19 nt, Artificial Sequence
  Synthetic
ccgaaauccccgaggacuu

SEQ ID NO: 11710 - RNA, 19 nt, Artificial Sequence
  Synthetic
caaccaaacagaaggcagu

SEQ ID NO: 11711 - RNA, 19 nt, Artificial Sequence
  Synthetic
uagaugaacuacaggugau

SEQ ID NO: 11712 - RNA, 19 nt, Artificial Sequence
  Synthetic
aggcugagcgaaaccgaua

SEQ ID NO: 11713 - RNA, 19 nt, Artificial Sequence
  Synthetic
cugcagaggaccaggauuc

SEQ ID NO: 11714 - RNA, 19 nt, Artificial Sequence
  Synthetic
aggaaauggcagaacuuca

SEQ ID NO: 11715 - RNA, 19 nt, Artificial Sequence
  Synthetic
acauugaguuggaagacua

SEQ ID NO: 11716 - RNA, 19 nt, Artificial Sequence
  Synthetic
gggagucucaggagggaua

SEQ ID NO: 11717 - RNA, 19 nt, Artificial Sequence
  Synthetic
gaauaaaguucucuugaca

SEQ ID NO: 11718 - RNA, 19 nt, Artificial Sequence
  Synthetic
gagcaagaggagcggaaga

SEQ ID NO: 11719 - RNA, 19 nt, Artificial Sequence
  Synthetic
gaucagaggcagaagagga

SEQ ID NO: 11720 - RNA, 19 nt, Artificial Sequence
  Synthetic
gagcggaagaaguguguca

SEQ ID NO: 11721 - RNA, 19 nt, Artificial Sequence
  Synthetic
gcaagggcccugagacuau

SEQ ID NO: 11722 - RNA, 19 nt, Artificial Sequence
  Synthetic
aggagcaagaggagcggaa

SEQ ID NO: 11723 - RNA, 19 nt, Artificial Sequence
  Synthetic
ccaccgucuucgagaggau

SEQ ID NO: 11724 - RNA, 19 nt, Artificial Sequence
  Synthetic
cugaaauccugaugcgcca

SEQ ID NO: 11725 - RNA, 19 nt, Artificial Sequence
  Synthetic
ugccauacauccaggacau

SEQ ID NO: 11726 - RNA, 19 nt, Artificial Sequence
  Synthetic
cagaagaggaggaggccag

SEQ ID NO: 11727 - RNA, 19 nt, Artificial Sequence
  Synthetic
caagaggagcggaagaagu

SEQ ID NO: 11728 - RNA, 19 nt, Artificial Sequence
  Synthetic
ccaaacagcccaucuucaa

SEQ ID NO: 11729 - RNA, 19 nt, Artificial Sequence
  Synthetic
gccuaaagcuccuggggca

SEQ ID NO: 11730 - RNA, 19 nt, Artificial Sequence
  Synthetic
cggaugaucuuaaaccuuu

SEQ ID NO: 11731 - RNA, 19 nt, Artificial Sequence
  Synthetic
gaccagagcaagacagugu

SEQ ID NO: 11732 - RNA, 19 nt, Artificial Sequence
  Synthetic
cccaguuuccaaugaauaa

SEQ ID NO: 11733 - RNA, 19 nt, Artificial Sequence
  Synthetic
gccaggaccaucagaguga

SEQ ID NO: 11734 - RNA, 19 nt, Artificial Sequence
  Synthetic
cuuggaaauugcugaagga

SEQ ID NO: 11735 - RNA, 19 nt, Artificial Sequence
  Synthetic
gcccaguuuccaaugaaua

SEQ ID NO: 11736 - RNA, 19 nt, Artificial Sequence
  Synthetic
ugccaggaccagagcaaga

SEQ ID NO: 11737 - RNA, 19 nt, Artificial Sequence
  Synthetic
gggcagacugugcacauuu

SEQ ID NO: 11738 - RNA, 19 nt, Artificial Sequence
  Synthetic
caggagggauaaccggauu

SEQ ID NO: 11739 - RNA, 19 nt, Artificial Sequence
  Synthetic
gcagaucagaggcagaaga

SEQ ID NO: 11740 - RNA, 19 nt, Artificial Sequence
  Synthetic
gcgcagaucagaggcagaa

SEQ ID NO: 11741 - RNA, 19 nt, Artificial Sequence
  Synthetic
ugccaggccugcacugaaa

SEQ ID NO: 11742 - RNA, 19 nt, Artificial Sequence
  Synthetic
ucaacagccuggucaacau

SEQ ID NO: 11743 - RNA, 19 nt, Artificial Sequence
  Synthetic
ugacuagucuucugcacuu

SEQ ID NO: 11744 - RNA, 19 nt, Artificial Sequence
  Synthetic
gaucuuaaaccuuuguguu

SEQ ID NO: 11745 - RNA, 19 nt, Artificial Sequence
  Synthetic
ccacagaagggaaggaaga

SEQ ID NO: 11746 - RNA, 19 nt, Artificial Sequence
  Synthetic
ggaagaaggacaccaguaa

SEQ ID NO: 11747 - RNA, 19 nt, Artificial Sequence
  Synthetic
aagaagaagaucaggaaga

SEQ ID NO: 11748 - RNA, 19 nt, Artificial Sequence
  Synthetic
cagaugaggaagaggaaga

SEQ ID NO: 11749 - RNA, 19 nt, Artificial Sequence
  Synthetic
gcaaggagcacgaagauga

SEQ ID NO: 11750 - RNA, 19 nt, Artificial Sequence
  Synthetic
ggaaccugcugguggagaa

SEQ ID NO: 11751 - RNA, 19 nt, Artificial Sequence
  Synthetic
ccauggagaacuuggagaa

SEQ ID NO: 11752 - RNA, 19 nt, Artificial Sequence
  Synthetic
gaaacgugcuugaaacaau

SEQ ID NO: 11753 - RNA, 19 nt, Artificial Sequence
  Synthetic
caucaaaagcauuguggaa

SEQ ID NO: 11754 - RNA, 19 nt, Artificial Sequence
  Synthetic
ggacagaugaggaagagga

SEQ ID NO: 11755 - RNA, 19 nt, Artificial Sequence
  Synthetic
ggagcacgaagaugagaaa

SEQ ID NO: 11756 - RNA, 19 nt, Artificial Sequence
  Synthetic
ccugagagccauugacuuu

SEQ ID NO: 11757 - RNA, 19 nt, Artificial Sequence
  Synthetic
gagaacagucaccagguaa

SEQ ID NO: 11758 - RNA, 19 nt, Artificial Sequence
  Synthetic
uggagaacuuggagaagca

SEQ ID NO: 11759 - RNA, 19 nt, Artificial Sequence
  Synthetic
agaacagucaccagguaaa

SEQ ID NO: 11760 - RNA, 19 nt, Artificial Sequence
  Synthetic
gggacgaugugcuguauuu

SEQ ID NO: 11761 - RNA, 19 nt, Artificial Sequence
  Synthetic
ugaagaagaagaucaggaa

SEQ ID NO: 11762 - RNA, 19 nt, Artificial Sequence
  Synthetic
gggaaggaagccagguuga

SEQ ID NO: 11763 - RNA, 19 nt, Artificial Sequence
  Synthetic
aagaucaggaagaggaaga

SEQ ID NO: 11764 - RNA, 19 nt, Artificial Sequence
  Synthetic
gcaaaucccuacuggacca

SEQ ID NO: 11765 - RNA, 19 nt, Artificial Sequence
  Synthetic
ggagaacagucaccaggua

SEQ ID NO: 11766 - RNA, 19 nt, Artificial Sequence
  Synthetic
guaaggagcuggaugaaug

SEQ ID NO: 11767 - RNA, 19 nt, Artificial Sequence
  Synthetic
ggaagacagagcagggcuu

SEQ ID NO: 11768 - RNA, 19 nt, Artificial Sequence
  Synthetic
augaggaagaggaagaauu

SEQ ID NO: 11769 - RNA, 19 nt, Artificial Sequence
  Synthetic
acaaaagacugaacugaau

SEQ ID NO: 11770 - RNA, 19 nt, Artificial Sequence
  Synthetic
cugaauaacuguaucucca

SEQ ID NO: 11771 - RNA, 19 nt, Artificial Sequence
  Synthetic
agaagaucaggaagaggaa

SEQ ID NO: 11772 - RNA, 19 nt, Artificial Sequence
  Synthetic
aagggaaggaagaaggaca

SEQ ID NO: 11773 - RNA, 19 nt, Artificial Sequence
  Synthetic
aggaagaaggacaccagua

SEQ ID NO: 11774 - RNA, 19 nt, Artificial Sequence
  Synthetic
agaacaucaucgacaucua

SEQ ID NO: 11775 - RNA, 19 nt, Artificial Sequence
  Synthetic
gcaggaagcccaagugaaa

SEQ ID NO: 11776 - RNA, 19 nt, Artificial Sequence
  Synthetic
agaugaagaugaagaagaa

SEQ ID NO: 11777 - RNA, 19 nt, Artificial Sequence
  Synthetic
gcagaaagcacuggaaaua

SEQ ID NO: 11778 - RNA, 19 nt, Artificial Sequence
  Synthetic
cagagaagaugaagaugaa

SEQ ID NO: 11779 - RNA, 19 nt, Artificial Sequence
  Synthetic
gaggagaggaagaaugaaa

SEQ ID NO: 11780 - RNA, 19 nt, Artificial Sequence
  Synthetic
aggaaaugugccagugaua

SEQ ID NO: 11781 - RNA, 19 nt, Artificial Sequence
  Synthetic
agaagaaggcggagaagga

SEQ ID NO: 11782 - RNA, 19 nt, Artificial Sequence
  Synthetic
ccaaagagcagcagaccau

SEQ ID NO: 11783 - RNA, 19 nt, Artificial Sequence
  Synthetic
gaacaggauuucugcaaaa

SEQ ID NO: 11784 - RNA, 19 nt, Artificial Sequence
  Synthetic
gagaagaugaagaugaaga

SEQ ID NO: 11785 - RNA, 19 nt, Artificial Sequence
  Synthetic
ggaauaauauccaggaaac

SEQ ID NO: 11786 - RNA, 19 nt, Artificial Sequence
  Synthetic
ucacacaaucccuggaaua

SEQ ID NO: 11787 - RNA, 19 nt, Artificial Sequence
  Synthetic
agaagaagaaggcggagaa

SEQ ID NO: 11788 - RNA, 19 nt, Artificial Sequence
  Synthetic
gcuuagagauguucacgaa

SEQ ID NO: 11789 - RNA, 19 nt, Artificial Sequence
  Synthetic
caaccucaauagagaagaa

SEQ ID NO: 11790 - RNA, 19 nt, Artificial Sequence
  Synthetic
gaaaugugccagugauauu

SEQ ID NO: 11791 - RNA, 19 nt, Artificial Sequence
  Synthetic
agaaagcacuggaaauaau

SEQ ID NO: 11792 - RNA, 19 nt, Artificial Sequence
  Synthetic
ggaaccugcugguggaaaa

SEQ ID NO: 11793 - RNA, 19 nt, Artificial Sequence
  Synthetic
gggaggagaagcaguagaa

SEQ ID NO: 11794 - RNA, 19 nt, Artificial Sequence
  Synthetic
gagcagcagaccauggaua

SEQ ID NO: 11795 - RNA, 19 nt, Artificial Sequence
  Synthetic
uauauggacuucagaggaa

SEQ ID NO: 11796 - RNA, 19 nt, Artificial Sequence
  Synthetic
acagagaagaugaagauga

SEQ ID NO: 11797 - RNA, 19 nt, Artificial Sequence
  Synthetic
uggauaacuuagagaagca

SEQ ID NO: 11798 - RNA, 19 nt, Artificial Sequence
  Synthetic
cagucaaccucaauagaga

SEQ ID NO: 11799 - RNA, 19 nt, Artificial Sequence
  Synthetic
gaauucaguuuauggauga

SEQ ID NO: 11800 - RNA, 19 nt, Artificial Sequence
  Synthetic
ucucauaggcacugacuuu

SEQ ID NO: 11801 - RNA, 19 nt, Artificial Sequence
  Synthetic
ccauaugacuuaucuaaca

SEQ ID NO: 11802 - RNA, 19 nt, Artificial Sequence
  Synthetic
aggagaaacuggaacaugu

SEQ ID NO: 11803 - RNA, 19 nt, Artificial Sequence
  Synthetic
caucaaaggcauuucagau

SEQ ID NO: 11804 - RNA, 19 nt, Artificial Sequence
  Synthetic
gaacauggcuaugagaaca

SEQ ID NO: 11805 - RNA, 19 nt, Artificial Sequence
  Synthetic
ugaaguaccuggaggagaa

SEQ ID NO: 11806 - RNA, 19 nt, Artificial Sequence
  Synthetic
gcaucugccuggaguguaa

SEQ ID NO: 11807 - RNA, 19 nt, Artificial Sequence
  Synthetic
aagaagcggaaaugagaaa

SEQ ID NO: 11808 - RNA, 19 nt, Artificial Sequence
  Synthetic
ggagcugccuggugaagua

SEQ ID NO: 11809 - RNA, 19 nt, Artificial Sequence
  Synthetic
aggagaagccggaggagga

SEQ ID NO: 11810 - RNA, 19 nt, Artificial Sequence
  Synthetic
gcgacgagcaggugagcau

SEQ ID NO: 11811 - RNA, 19 nt, Artificial Sequence
  Synthetic
cggaggaggacaacgacua

SEQ ID NO: 11812 - RNA, 19 nt, Artificial Sequence
  Synthetic
guacaucggucaugacaga

SEQ ID NO: 11813 - RNA, 19 nt, Artificial Sequence
  Synthetic
augagaaagcagagggagu

SEQ ID NO: 11814 - RNA, 19 nt, Artificial Sequence
  Synthetic
ccaagaagcggaaaugaga

SEQ ID NO: 11815 - RNA, 19 nt, Artificial Sequence
  Synthetic
gucacuagguggagauuca

SEQ ID NO: 11816 - RNA, 19 nt, Artificial Sequence
  Synthetic
agacgacaguucaaacaaa

SEQ ID NO: 11817 - RNA, 19 nt, Artificial Sequence
  Synthetic
gacagaaccaugcaagaua

SEQ ID NO: 11818 - RNA, 19 nt, Artificial Sequence
  Synthetic
agauggacuugcugugaau

SEQ ID NO: 11819 - RNA, 19 nt, Artificial Sequence
  Synthetic
gcggaaaugagaaagcaga

SEQ ID NO: 11820 - RNA, 19 nt, Artificial Sequence
  Synthetic
uuaacgagcuggacauuuu

SEQ ID NO: 11821 - RNA, 19 nt, Artificial Sequence
  Synthetic
aagaucaagcugugggaca

SEQ ID NO: 11822 - RNA, 19 nt, Artificial Sequence
  Synthetic
caaagauguugaccaggaa

SEQ ID NO: 11823 - RNA, 19 nt, Artificial Sequence
  Synthetic
ccaaggagcugaucaauaa

SEQ ID NO: 11824 - RNA, 19 nt, Artificial Sequence
  Synthetic
ucgcagaacacuaagauua

SEQ ID NO: 11825 - RNA, 19 nt, Artificial Sequence
  Synthetic
gaagaagagaagaucaaua

SEQ ID NO: 11826 - RNA, 19 nt, Artificial Sequence
  Synthetic
gacaauagccggaggcaga

SEQ ID NO: 11827 - RNA, 19 nt, Artificial Sequence
  Synthetic
aggcagaagcaguuguuaa

SEQ ID NO: 11828 - RNA, 19 nt, Artificial Sequence
  Synthetic
augaagaagagaagaucaa

SEQ ID NO: 11829 - RNA, 19 nt, Artificial Sequence
  Synthetic
gcgaggagcaugaagaaga

SEQ ID NO: 11830 - RNA, 19 nt, Artificial Sequence
  Synthetic
gaaaccugcuaguggagaa

SEQ ID NO: 11831 - RNA, 19 nt, Artificial Sequence
  Synthetic
gggaggaucucaauaaaga

SEQ ID NO: 11832 - RNA, 19 nt, Artificial Sequence
  Synthetic
ggcagaagcaguuguuaaa

SEQ ID NO: 11833 - RNA, 19 nt, Artificial Sequence
  Synthetic
gccaaggagcugaucaaua

SEQ ID NO: 11834 - RNA, 19 nt, Artificial Sequence
  Synthetic
uggacaaccuggagaagca

SEQ ID NO: 11835 - RNA, 19 nt, Artificial Sequence
  Synthetic
aggccaaggagcugaucaa

SEQ ID NO: 11836 - RNA, 19 nt, Artificial Sequence
  Synthetic
ccguaaggguggagcacgu

SEQ ID NO: 11837 - RNA, 19 nt, Artificial Sequence
  Synthetic
ggagaacauuaucgacauu

SEQ ID NO: 11838 - RNA, 19 nt, Artificial Sequence
  Synthetic
aggcaaugaccgcgugcaa

SEQ ID NO: 11839 - RNA, 19 nt, Artificial Sequence
  Synthetic
gcauggacaaccuggagaa

SEQ ID NO: 11840 - RNA, 19 nt, Artificial Sequence
  Synthetic
ccucuaagcugguggaguc

SEQ ID NO: 11841 - RNA, 19 nt, Artificial Sequence
  Synthetic
augagagcauggagcaauu

SEQ ID NO: 11842 - RNA, 19 nt, Artificial Sequence
  Synthetic
uggaggagcgcaaggguga

SEQ ID NO: 11843 - RNA, 19 nt, Artificial Sequence
  Synthetic
ucuacggccugcagcgaaa

SEQ ID NO: 11844 - RNA, 19 nt, Artificial Sequence
  Synthetic
uuacaaacgccagaagaaa

SEQ ID NO: 11845 - RNA, 19 nt, Artificial Sequence
  Synthetic
ccgggaggaucucaauaaa

SEQ ID NO: 11846 - RNA, 19 nt, Artificial Sequence
  Synthetic
gugcgaggagcaugaagaa

SEQ ID NO: 11847 - RNA, 19 nt, Artificial Sequence
  Synthetic
guggagaacauuaucgaca

SEQ ID NO: 11848 - RNA, 19 nt, Artificial Sequence
  Synthetic
aggagaagcugcagcgcgu

SEQ ID NO: 11849 - RNA, 19 nt, Artificial Sequence
  Synthetic
gccagacuaucgaggacaa

SEQ ID NO: 11850 - RNA, 19 nt, Artificial Sequence
  Synthetic
cccgggagcaagaggagaa

SEQ ID NO: 11851 - RNA, 19 nt, Artificial Sequence
  Synthetic
ucacacagauggaggaggu

SEQ ID NO: 11852 - RNA, 19 nt, Artificial Sequence
  Synthetic
cgcagaacacuaagauuau

SEQ ID NO: 11853 - RNA, 19 nt, Artificial Sequence
  Synthetic
ccaaggaacuggaggccua

SEQ ID NO: 11854 - RNA, 19 nt, Artificial Sequence
  Synthetic
ugaacauccuggagaaaua

SEQ ID NO: 11855 - RNA, 19 nt, Artificial Sequence
  Synthetic
ggaagaaggccuccagcua

SEQ ID NO: 11856 - RNA, 19 nt, Artificial Sequence
  Synthetic
aagacaagguugaagauga

SEQ ID NO: 11857 - RNA, 19 nt, Artificial Sequence
  Synthetic
agacaagguugaagaugau

SEQ ID NO: 11858 - RNA, 19 nt, Artificial Sequence
  Synthetic
gagcuguaccuuugagaau

SEQ ID NO: 11859 - RNA, 19 nt, Artificial Sequence
  Synthetic
gcagaauacucauccaaga

SEQ ID NO: 11860 - RNA, 19 nt, Artificial Sequence
  Synthetic
uggagcagcuguuggaaga

SEQ ID NO: 11861 - RNA, 19 nt, Artificial Sequence
  Synthetic
ggguguguguuaugugcaa

SEQ ID NO: 11862 - RNA, 19 nt, Artificial Sequence
  Synthetic
guggagauccugagaagca

SEQ ID NO: 11863 - RNA, 19 nt, Artificial Sequence
  Synthetic
agacaagaugcgggaagaa

SEQ ID NO: 11864 - RNA, 19 nt, Artificial Sequence
  Synthetic
uggaagacaagguugaaga

SEQ ID NO: 11865 - RNA, 19 nt, Artificial Sequence
  Synthetic
cgagaugugcugcgauuau

SEQ ID NO: 11866 - RNA, 19 nt, Artificial Sequence
  Synthetic
gccgagaugugcugcgauu

SEQ ID NO: 11867 - RNA, 19 nt, Artificial Sequence
  Synthetic
agucaagucugguacugua

SEQ ID NO: 11868 - RNA, 19 nt, Artificial Sequence
  Synthetic
gcugcagcuuucagaauuu

SEQ ID NO: 11869 - RNA, 19 nt, Artificial Sequence
  Synthetic
gcuguaccuuugagaauga

SEQ ID NO: 11870 - RNA, 19 nt, Artificial Sequence
  Synthetic
gauuauauggcuacacaga

SEQ ID NO: 11871 - RNA, 19 nt, Artificial Sequence
  Synthetic
uggcugagcuggcuggaca

SEQ ID NO: 11872 - RNA, 19 nt, Artificial Sequence
  Synthetic
cugcaugaguucuggguua

SEQ ID NO: 11873 - RNA, 19 nt, Artificial Sequence
  Synthetic
gcuaauagucuguccuaaa

SEQ ID NO: 11874 - RNA, 19 nt, Artificial Sequence
  Synthetic
gaggauguguuguuagaaa

SEQ ID NO: 11875 - RNA, 19 nt, Artificial Sequence
  Synthetic
gcggaggagucgagcagaa

SEQ ID NO: 11876 - RNA, 19 nt, Artificial Sequence
  Synthetic
agaaagaaccaguaucaaa

SEQ ID NO: 11877 - RNA, 19 nt, Artificial Sequence
  Synthetic
agauauagcuagugucuga

SEQ ID NO: 11878 - RNA, 19 nt, Artificial Sequence
  Synthetic
gagcagaagaauagaagga

SEQ ID NO: 11879 - RNA, 19 nt, Artificial Sequence
  Synthetic
guuagaaagugguacagaa

SEQ ID NO: 11880 - RNA, 19 nt, Artificial Sequence
  Synthetic
ggugauaggaugugaugau

SEQ ID NO: 11881 - RNA, 19 nt, Artificial Sequence
  Synthetic
agucaaugcaguugcuuua

SEQ ID NO: 11882 - RNA, 19 nt, Artificial Sequence
  Synthetic
uuagaaagugguacagaaa

SEQ ID NO: 11883 - RNA, 19 nt, Artificial Sequence
  Synthetic
guacagaaaccugaggaaa

SEQ ID NO: 11884 - RNA, 19 nt, Artificial Sequence
  Synthetic
guagaaagaaccaguauca

SEQ ID NO: 11885 - RNA, 19 nt, Artificial Sequence
  Synthetic
gguacagaaaccugaggaa

SEQ ID NO: 11886 - RNA, 19 nt, Artificial Sequence
  Synthetic
gaauagaaggaaggugaua

SEQ ID NO: 11887 - RNA, 19 nt, Artificial Sequence
  Synthetic
guuagguaauucugaggaa

SEQ ID NO: 11888 - RNA, 19 nt, Artificial Sequence
  Synthetic
ggccauaaaucgaaguguu

SEQ ID NO: 11889 - RNA, 19 nt, Artificial Sequence
  Synthetic
agaagaggaaugggagaaa

SEQ ID NO: 11890 - RNA, 19 nt, Artificial Sequence
  Synthetic
cagaagaggaaugggagaa

SEQ ID NO: 11891 - RNA, 19 nt, Artificial Sequence
  Synthetic
gauaggaugugaugauaga

SEQ ID NO: 11892 - RNA, 19 nt, Artificial Sequence
  Synthetic
ggaugugaugauagaauuu

SEQ ID NO: 11893 - RNA, 19 nt, Artificial Sequence
  Synthetic
ucauagucaaggaaaguua

SEQ ID NO: 11894 - RNA, 19 nt, Artificial Sequence
  Synthetic
gcacagaaguugggccuca

SEQ ID NO: 11895 - RNA, 19 nt, Artificial Sequence
  Synthetic
gaugaaugggagaagguga

SEQ ID NO: 11896 - RNA, 19 nt, Artificial Sequence
  Synthetic
augaaugggagaaggugaa

SEQ ID NO: 11897 - RNA, 19 nt, Artificial Sequence
  Synthetic
ggagucgagcagaagaaua

SEQ ID NO: 11898 - RNA, 19 nt, Artificial Sequence
  Synthetic
gagaggauguguuguuaga

SEQ ID NO: 11899 - RNA, 19 nt, Artificial Sequence
  Synthetic
uacagaaaccugaggaaaa

SEQ ID NO: 11900 - RNA, 19 nt, Artificial Sequence
  Synthetic
acagaagaggaaugggaga

SEQ ID NO: 11901 - RNA, 19 nt, Artificial Sequence
  Synthetic
ucaaggaaaguuagguaau

SEQ ID NO: 11902 - RNA, 19 nt, Artificial Sequence
  Synthetic
gcuuauggauggagaccaa

SEQ ID NO: 11903 - RNA, 19 nt, Artificial Sequence
  Synthetic
gguuauacaaagagaauga

SEQ ID NO: 11904 - RNA, 19 nt, Artificial Sequence
  Synthetic
agaagggacuggaaaguua

SEQ ID NO: 11905 - RNA, 19 nt, Artificial Sequence
  Synthetic
ggaugaugaugaugaagaa

SEQ ID NO: 11906 - RNA, 19 nt, Artificial Sequence
  Synthetic
agauacuugucgugagaaa

SEQ ID NO: 11907 - RNA, 19 nt, Artificial Sequence
  Synthetic
gcacagguacaaagugaaa

SEQ ID NO: 11908 - RNA, 19 nt, Artificial Sequence
  Synthetic
gcacagaagggacuggaaa

SEQ ID NO: 11909 - RNA, 19 nt, Artificial Sequence
  Synthetic
gggaacugguagagaaagu

SEQ ID NO: 11910 - RNA, 19 nt, Artificial Sequence
  Synthetic
cagcaaacacagaagauga

SEQ ID NO: 11911 - RNA, 19 nt, Artificial Sequence
  Synthetic
acacagaagaugaugauga

SEQ ID NO: 11912 - RNA, 19 nt, Artificial Sequence
  Synthetic
cggcacagguacaaaguga

SEQ ID NO: 11913 - RNA, 19 nt, Artificial Sequence
  Synthetic
ugaugaugaugaagaagaa

SEQ ID NO: 11914 - RNA, 19 nt, Artificial Sequence
  Synthetic
ggacacaagcagucugaau

SEQ ID NO: 11915 - RNA, 19 nt, Artificial Sequence
  Synthetic
agaagaagacgcagaggau

SEQ ID NO: 11916 - RNA, 19 nt, Artificial Sequence
  Synthetic
cugcuauggugcugaguuu

SEQ ID NO: 11917 - RNA, 19 nt, Artificial Sequence
  Synthetic
agagaaaguaaaccgguua

SEQ ID NO: 11918 - RNA, 19 nt, Artificial Sequence
  Synthetic
agaaagaagacuuggugga

SEQ ID NO: 11919 - RNA, 19 nt, Artificial Sequence
  Synthetic
uauucuggcuguugugaaa

SEQ ID NO: 11920 - RNA, 19 nt, Artificial Sequence
  Synthetic
aagaagacuugguggaucu

SEQ ID NO: 11921 - RNA, 19 nt, Artificial Sequence
  Synthetic
ggagagagugagagcuuca

SEQ ID NO: 11922 - RNA, 19 nt, Artificial Sequence
  Synthetic
ccgguuauacaaagagaau

SEQ ID NO: 11923 - RNA, 19 nt, Artificial Sequence
  Synthetic
guauagugaagguguauuu

SEQ ID NO: 11924 - RNA, 19 nt, Artificial Sequence
  Synthetic
uugaugauguggaaggaau

SEQ ID NO: 11925 - RNA, 19 nt, Artificial Sequence
  Synthetic
gaacugguagagaaaguaa

SEQ ID NO: 11926 - RNA, 19 nt, Artificial Sequence
  Synthetic
gcggcaagcgcaugaguga

SEQ ID NO: 11927 - RNA, 19 nt, Artificial Sequence
  Synthetic
ggcccaacauaguuuguaa

SEQ ID NO: 11928 - RNA, 19 nt, Artificial Sequence
  Synthetic
augggaacugguagagaaa

SEQ ID NO: 11929 - RNA, 19 nt, Artificial Sequence
  Synthetic
ucugagaaauauacccaua

SEQ ID NO: 11930 - RNA, 19 nt, Artificial Sequence
  Synthetic
aaggagagagugagagcuu

SEQ ID NO: 11931 - RNA, 19 nt, Artificial Sequence
  Synthetic
acgacgaugaugaggauga

SEQ ID NO: 11932 - RNA, 19 nt, Artificial Sequence
  Synthetic
uaaugaugguggagagaau

SEQ ID NO: 11933 - RNA, 19 nt, Artificial Sequence
  Synthetic
gggaaguagaaguagcaaa

SEQ ID NO: 11934 - RNA, 19 nt, Artificial Sequence
  Synthetic
gagcaaggauucuggcuuu

SEQ ID NO: 11935 - RNA, 19 nt, Artificial Sequence
  Synthetic
ggaaagugguacugggaag

SEQ ID NO: 11936 - RNA, 19 nt, Artificial Sequence
  Synthetic
aaguagaaguagcaaagaa

SEQ ID NO: 11937 - RNA, 19 nt, Artificial Sequence
  Synthetic
aggcaaagacggaacaaca

SEQ ID NO: 11938 - RNA, 19 nt, Artificial Sequence
  Synthetic
aggauauguuggugagcau

SEQ ID NO: 11939 - RNA, 19 nt, Artificial Sequence
  Synthetic
ggaaugaaggugcuggcaa

SEQ ID NO: 11940 - RNA, 19 nt, Artificial Sequence
  Synthetic
auaaagaaccauugcacau

SEQ ID NO: 11941 - RNA, 19 nt, Artificial Sequence
  Synthetic
ggugacauuaagaagauaa

SEQ ID NO: 11942 - RNA, 19 nt, Artificial Sequence
  Synthetic
augaggagauggaguugaa

SEQ ID NO: 11943 - RNA, 19 nt, Artificial Sequence
  Synthetic
gaaugaaggugcuggcaac

SEQ ID NO: 11944 - RNA, 19 nt, Artificial Sequence
  Synthetic
ggaaccaaacugaucuaaa

SEQ ID NO: 11945 - RNA, 19 nt, Artificial Sequence
  Synthetic
uggagaaacuuuaucccua

SEQ ID NO: 11946 - RNA, 19 nt, Artificial Sequence
  Synthetic
uggugagcauucaggcaaa

SEQ ID NO: 11947 - RNA, 19 nt, Artificial Sequence
  Synthetic
caacagaacuccuucgacu

SEQ ID NO: 11948 - RNA, 19 nt, Artificial Sequence
  Synthetic
ggaaguagaaguagcaaag

SEQ ID NO: 11949 - RNA, 19 nt, Artificial Sequence
  Synthetic
caguuggaguugucagaga

SEQ ID NO: 11950 - RNA, 19 nt, Artificial Sequence
  Synthetic
cgucuggcauggugacauu

SEQ ID NO: 11951 - RNA, 19 nt, Artificial Sequence
  Synthetic
cugaugauccugagagguu

SEQ ID NO: 11952 - RNA, 19 nt, Artificial Sequence
  Synthetic
gggcauauaccuggauuau

SEQ ID NO: 11953 - RNA, 19 nt, Artificial Sequence
  Synthetic
uacaugguauggagggaaa

SEQ ID NO: 11954 - RNA, 19 nt, Artificial Sequence
  Synthetic
aucuaaaggcucuggauuu

SEQ ID NO: 11955 - RNA, 19 nt, Artificial Sequence
  Synthetic
gaagauaaugccugaugau

SEQ ID NO: 11956 - RNA, 19 nt, Artificial Sequence
  Synthetic
augaugguggagagaauaa

SEQ ID NO: 11957 - RNA, 19 nt, Artificial Sequence
  Synthetic
gggaaaugcaggacacucu

SEQ ID NO: 11958 - RNA, 19 nt, Artificial Sequence
  Synthetic
aaguagcaaagaagacaaa

SEQ ID NO: 11959 - RNA, 19 nt, Artificial Sequence
  Synthetic
gaaguagcaaagaagacaa

SEQ ID NO: 11960 - RNA, 19 nt, Artificial Sequence
  Synthetic
uccucuaacuccugagcaa

SEQ ID NO: 11961 - RNA, 19 nt, Artificial Sequence
  Synthetic
ucgacaaggugggcauaua

SEQ ID NO: 11962 - RNA, 19 nt, Artificial Sequence
  Synthetic
acaaauggcuuaaggcaaa

SEQ ID NO: 11963 - RNA, 19 nt, Artificial Sequence
  Synthetic
uguagaagauggagaagua

SEQ ID NO: 11964 - RNA, 19 nt, Artificial Sequence
  Synthetic
ccuaagaagcacaaauuua

SEQ ID NO: 11965 - RNA, 19 nt, Artificial Sequence
  Synthetic
uguauaaucugguguguua

SEQ ID NO: 11966 - RNA, 19 nt, Artificial Sequence
  Synthetic
guaaguucuuugagcauaa

SEQ ID NO: 11967 - RNA, 19 nt, Artificial Sequence
  Synthetic
ugucagugcaucagaaaua

SEQ ID NO: 11968 - RNA, 19 nt, Artificial Sequence
  Synthetic
ggaaggaagcgcagugaca

SEQ ID NO: 11969 - RNA, 19 nt, Artificial Sequence
  Synthetic
gcacaugguuaaugcacau

SEQ ID NO: 11970 - RNA, 19 nt, Artificial Sequence
  Synthetic
gaagauaguccaaguccua

SEQ ID NO: 11971 - RNA, 19 nt, Artificial Sequence
  Synthetic
gacaaauggcuuaaggcaa

SEQ ID NO: 11972 - RNA, 19 nt, Artificial Sequence
  Synthetic
gcagcuacuuagagucuua

SEQ ID NO: 11973 - RNA, 19 nt, Artificial Sequence
  Synthetic
caauuagucuucacaguua

SEQ ID NO: 11974 - RNA, 19 nt, Artificial Sequence
  Synthetic
ccagagaggaagaagggau

SEQ ID NO: 11975 - RNA, 19 nt, Artificial Sequence
  Synthetic
gaauguguguguaguuuua

SEQ ID NO: 11976 - RNA, 19 nt, Artificial Sequence
  Synthetic
gauagaaaaugaaguggaa

SEQ ID NO: 11977 - RNA, 19 nt, Artificial Sequence
  Synthetic
agauguagaagauggagaa

SEQ ID NO: 11978 - RNA, 19 nt, Artificial Sequence
  Synthetic
gaacagacuuuguguguag

SEQ ID NO: 11979 - RNA, 19 nt, Artificial Sequence
  Synthetic
gaggguuguugguaauaaa

SEQ ID NO: 11980 - RNA, 19 nt, Artificial Sequence
  Synthetic
ugccaaguguguugacaaa

SEQ ID NO: 11981 - RNA, 19 nt, Artificial Sequence
  Synthetic
uggcagagcgacugggaga

SEQ ID NO: 11982 - RNA, 19 nt, Artificial Sequence
  Synthetic
gcuuugaauuagauguaga

SEQ ID NO: 11983 - RNA, 19 nt, Artificial Sequence
  Synthetic
aaguggaacucuuaggaga

SEQ ID NO: 11984 - RNA, 19 nt, Artificial Sequence
  Synthetic
agaagauggagaaguagaa

SEQ ID NO: 11985 - RNA, 19 nt, Artificial Sequence
  Synthetic
ccaacuugcuguuuccaaa

SEQ ID NO: 11986 - RNA, 19 nt, Artificial Sequence
  Synthetic
ugacuaaagcagauauuga

SEQ ID NO: 11987 - RNA, 19 nt, Artificial Sequence
  Synthetic
ggaaucauuugcugaguca

SEQ ID NO: 11988 - RNA, 19 nt, Artificial Sequence
  Synthetic
gagucaaggcagcuacuua

SEQ ID NO: 11989 - RNA, 19 nt, Artificial Sequence
  Synthetic
cagcuuugaauuagaugua

SEQ ID NO: 11990 - RNA, 19 nt, Artificial Sequence
  Synthetic
gcacuuaccaguaccauau

SEQ ID NO: 11991 - RNA, 19 nt, Artificial Sequence
  Synthetic
ccuuagaccugauuuguuu

SEQ ID NO: 11992 - RNA, 19 nt, Artificial Sequence
  Synthetic
gguugaagagagaggcaau

SEQ ID NO: 11993 - RNA, 19 nt, Artificial Sequence
  Synthetic
cggaaagcggcaaaaguua

SEQ ID NO: 11994 - RNA, 19 nt, Artificial Sequence
  Synthetic
ggagagauuugacgagacu

SEQ ID NO: 11995 - RNA, 19 nt, Artificial Sequence
  Synthetic
ggaaagcggcaaaaguuaa

SEQ ID NO: 11996 - RNA, 19 nt, Artificial Sequence
  Synthetic
agagauuugacgagacuga

SEQ ID NO: 11997 - RNA, 19 nt, Artificial Sequence
  Synthetic
ggcaaaaguuaaugcggga

SEQ ID NO: 11998 - RNA, 19 nt, Artificial Sequence
  Synthetic
uggcgguggaggugcgaau

SEQ ID NO: 11999 - RNA, 19 nt, Artificial Sequence
  Synthetic
ccccaucaguauugguaaa

SEQ ID NO: 12000 - RNA, 19 nt, Artificial Sequence
  Synthetic
gagucggagagaagggcau

SEQ ID NO: 12001 - RNA, 19 nt, Artificial Sequence
  Synthetic
ggagagaagggcaucuaca

SEQ ID NO: 12002 - RNA, 19 nt, Artificial Sequence
  Synthetic
cauugcaggaguauuaaua

SEQ ID NO: 12003 - RNA, 19 nt, Artificial Sequence
  Synthetic
gggaaagguugguaugaaa

SEQ ID NO: 12004 - RNA, 19 nt, Artificial Sequence
  Synthetic
caugaaagguugagaacau

SEQ ID NO: 12005 - RNA, 19 nt, Artificial Sequence
  Synthetic
ggaaacugcuggagaugaa

SEQ ID NO: 12006 - RNA, 19 nt, Artificial Sequence
  Synthetic
ccauagaacucguggaaac

SEQ ID NO: 12007 - RNA, 19 nt, Artificial Sequence
  Synthetic
caauaaaggccauucguua

SEQ ID NO: 12008 - RNA, 19 nt, Artificial Sequence
  Synthetic
acucagagaucgugcagaa

SEQ ID NO: 12009 - RNA, 19 nt, Artificial Sequence
  Synthetic
ccaguuaguuugaaugaaa

SEQ ID NO: 12010 - RNA, 19 nt, Artificial Sequence
  Synthetic
gcgucgugguggagcaaua

SEQ ID NO: 12011 - RNA, 19 nt, Artificial Sequence
  Synthetic
ccaaagagcacaaugagua

SEQ ID NO: 12012 - RNA, 19 nt, Artificial Sequence
  Synthetic
gcacaggacaugcaagaua

SEQ ID NO: 12013 - RNA, 19 nt, Artificial Sequence
  Synthetic
gcacaaugaguacaagaaa

SEQ ID NO: 12014 - RNA, 19 nt, Artificial Sequence
  Synthetic
gcaauaaauucuagacaag

SEQ ID NO: 12015 - RNA, 19 nt, Artificial Sequence
  Synthetic
caacuucagugguuaauua

SEQ ID NO: 12016 - RNA, 19 nt, Artificial Sequence
  Synthetic
cccacaagauguagcacua

SEQ ID NO: 12017 - RNA, 19 nt, Artificial Sequence
  Synthetic
agaagaagaccaaggagga

SEQ ID NO: 12018 - RNA, 19 nt, Artificial Sequence
  Synthetic
gcaccaaagagcacaauga

SEQ ID NO: 12019 - RNA, 19 nt, Artificial Sequence
  Synthetic
agaccaaggaggaaugcua

SEQ ID NO: 12020 - RNA, 19 nt, Artificial Sequence
  Synthetic
cguggaaacugcuggagau

SEQ ID NO: 12021 - RNA, 19 nt, Artificial Sequence
  Synthetic
ggaaaggaaaggcaccaaa

SEQ ID NO: 12022 - RNA, 19 nt, Artificial Sequence
  Synthetic
gacgaaagaagaagaccaa

SEQ ID NO: 12023 - RNA, 19 nt, Artificial Sequence
  Synthetic
aaacugcgaacuagggaaa

SEQ ID NO: 12024 - RNA, 19 nt, Artificial Sequence
  Synthetic
gagaugaaauuguggaccu

SEQ ID NO: 12025 - RNA, 19 nt, Artificial Sequence
  Synthetic
gaagaagaccaaggaggaa

SEQ ID NO: 12026 - RNA, 19 nt, Artificial Sequence
  Synthetic
ucauugaucugcagugauu

SEQ ID NO: 12027 - RNA, 19 nt, Artificial Sequence
  Synthetic
uugcccaacuuguaggaaa

SEQ ID NO: 12028 - RNA, 19 nt, Artificial Sequence
  Synthetic
aagaaagcgucguggugga

SEQ ID NO: 12029 - RNA, 19 nt, Artificial Sequence
  Synthetic
guuacuucguccuaaauua

SEQ ID NO: 12030 - RNA, 19 nt, Artificial Sequence
  Synthetic
gcagugacgaugaggaguu

SEQ ID NO: 12031 - RNA, 19 nt, Artificial Sequence
  Synthetic
cacaggacaugcaagauaa

SEQ ID NO: 12032 - RNA, 19 nt, Artificial Sequence
  Synthetic
agacaagcucagaagcgaa

SEQ ID NO: 12033 - RNA, 19 nt, Artificial Sequence
  Synthetic
gcaagaagaucgcggauga

SEQ ID NO: 12034 - RNA, 19 nt, Artificial Sequence
  Synthetic
agaggaagguggaggucua

SEQ ID NO: 12035 - RNA, 19 nt, Artificial Sequence
  Synthetic
augcagaguuagaggaaaa

SEQ ID NO: 12036 - RNA, 19 nt, Artificial Sequence
  Synthetic
acuccgagcuccaggauaa

SEQ ID NO: 12037 - RNA, 19 nt, Artificial Sequence
  Synthetic
cuacagcaguugcgggaaa

SEQ ID NO: 12038 - RNA, 19 nt, Artificial Sequence
  Synthetic
uggcagagcuggagaaacu

SEQ ID NO: 12039 - RNA, 19 nt, Artificial Sequence
  Synthetic
gcaucgaguuugagcagaa

SEQ ID NO: 12040 - RNA, 19 nt, Artificial Sequence
  Synthetic
gggaauuggaggagaggga

SEQ ID NO: 12041 - RNA, 19 nt, Artificial Sequence
  Synthetic
agacaacaguggaggacuu

SEQ ID NO: 12042 - RNA, 19 nt, Artificial Sequence
  Synthetic
aggaggagaucaaggagua

SEQ ID NO: 12043 - RNA, 19 nt, Artificial Sequence
  Synthetic
gggauaaggugcagcucau

SEQ ID NO: 12044 - RNA, 19 nt, Artificial Sequence
  Synthetic
ugcagaagcuggaggagaa

SEQ ID NO: 12045 - RNA, 19 nt, Artificial Sequence
  Synthetic
caggagagccagaaggaga

SEQ ID NO: 12046 - RNA, 19 nt, Artificial Sequence
  Synthetic
ccacucagcugcaggagaa

SEQ ID NO: 12047 - RNA, 19 nt, Artificial Sequence
  Synthetic
uggaagaaaccaagcggaa

SEQ ID NO: 12048 - RNA, 19 nt, Artificial Sequence
  Synthetic
gaauugagaaguuggagaa

SEQ ID NO: 12049 - RNA, 19 nt, Artificial Sequence
  Synthetic
aggcuaaggccgagguuga

SEQ ID NO: 12050 - RNA, 19 nt, Artificial Sequence
  Synthetic
gaucgaagggagagcaaga

SEQ ID NO: 12051 - RNA, 19 nt, Artificial Sequence
  Synthetic
gaugcugaaugcagaguua

SEQ ID NO: 12052 - RNA, 19 nt, Artificial Sequence
  Synthetic
gggaaaaggaugaugccaa

SEQ ID NO: 12053 - RNA, 19 nt, Artificial Sequence
  Synthetic
aggcagaggagcagauaga

SEQ ID NO: 12054 - RNA, 19 nt, Artificial Sequence
  Synthetic
ccgggcugcucgugagaaa

SEQ ID NO: 12055 - RNA, 19 nt, Artificial Sequence
  Synthetic
gagaacgaauugagaaguu

SEQ ID NO: 12056 - RNA, 19 nt, Artificial Sequence
  Synthetic
agaccaaggugcuggagau

SEQ ID NO: 12057 - RNA, 19 nt, Artificial Sequence
  Synthetic
ccaccaagcaggaggagga

SEQ ID NO: 12058 - RNA, 19 nt, Artificial Sequence
  Synthetic
cccaaggagcagcgggaua

SEQ ID NO: 12059 - RNA, 19 nt, Artificial Sequence
  Synthetic
cagcggaacgcaaggcuaa

SEQ ID NO: 12060 - RNA, 19 nt, Artificial Sequence
  Synthetic
gaaaccaagcggaaggaau

SEQ ID NO: 12061 - RNA, 19 nt, Artificial Sequence
  Synthetic
gaaccaacaucaucaguuu

SEQ ID NO: 12062 - RNA, 19 nt, Artificial Sequence
  Synthetic
gggagaaggccaaggugga

SEQ ID NO: 12063 - RNA, 19 nt, Artificial Sequence
  Synthetic
gggaugacauggugcaaga

SEQ ID NO: 12064 - RNA, 19 nt, Artificial Sequence
  Synthetic
ccaaagaugagcugcccaa

SEQ ID NO: 12065 - RNA, 19 nt, Artificial Sequence
  Synthetic
gcauggcguggaagagaua

SEQ ID NO: 12066 - RNA, 19 nt, Artificial Sequence
  Synthetic
ucgcagagcuggagaagac

SEQ ID NO: 12067 - RNA, 19 nt, Artificial Sequence
  Synthetic
gcucagugguacagcagca

SEQ ID NO: 12068 - RNA, 19 nt, Artificial Sequence
  Synthetic
cgugauggccugugagaac

SEQ ID NO: 12069 - RNA, 19 nt, Artificial Sequence
  Synthetic
gagacauccagcugcuaaa

SEQ ID NO: 12070 - RNA, 19 nt, Artificial Sequence
  Synthetic
gcagauugccugugacaac

SEQ ID NO: 12071 - RNA, 19 nt, Artificial Sequence
  Synthetic
gcaguggagucuuggagga

SEQ ID NO: 12072 - RNA, 19 nt, Artificial Sequence
  Synthetic
uggcggagcagaagcgaga

SEQ ID NO: 12073 - RNA, 19 nt, Artificial Sequence
  Synthetic
aggagacaauugaauacaa

SEQ ID NO: 12074 - RNA, 19 nt, Artificial Sequence
  Synthetic
ugacauggugcaagagcca

SEQ ID NO: 12075 - RNA, 19 nt, Artificial Sequence
  Synthetic
acaagugguugaaggccaa

SEQ ID NO: 12076 - RNA, 19 nt, Artificial Sequence
  Synthetic
gacaagugguugaaggcca

SEQ ID NO: 12077 - RNA, 19 nt, Artificial Sequence
  Synthetic
gcuuuaacccggacagcca

SEQ ID NO: 12078 - RNA, 19 nt, Artificial Sequence
  Synthetic
ccaaugucaccaacagcaa

SEQ ID NO: 12079 - RNA, 19 nt, Artificial Sequence
  Synthetic
cggcaagaguguccaguau

SEQ ID NO: 12080 - RNA, 19 nt, Artificial Sequence
  Synthetic
gcgcgaccuucgaauguaa

SEQ ID NO: 12081 - RNA, 19 nt, Artificial Sequence
  Synthetic
gcaagaguguccaguaugu

SEQ ID NO: 12082 - RNA, 19 nt, Artificial Sequence
  Synthetic
cuucaucaguggcuggaga

SEQ ID NO: 12083 - RNA, 19 nt, Artificial Sequence
  Synthetic
aagaguguccaguauguaa

SEQ ID NO: 12084 - RNA, 19 nt, Artificial Sequence
  Synthetic
agaagguugucccgcuuua

SEQ ID NO: 12085 - RNA, 19 nt, Artificial Sequence
  Synthetic
gggaagcuguggucagugu

SEQ ID NO: 12086 - RNA, 19 nt, Artificial Sequence
  Synthetic
gccuccagcuggcaggauu

SEQ ID NO: 12087 - RNA, 19 nt, Artificial Sequence
  Synthetic
gaccuucgaauguaauaua

SEQ ID NO: 12088 - RNA, 19 nt, Artificial Sequence
  Synthetic
gcgaccuucgaauguaaua

SEQ ID NO: 12089 - RNA, 19 nt, Artificial Sequence
  Synthetic
ccacuucucauuugguguu

SEQ ID NO: 12090 - RNA, 19 nt, Artificial Sequence
  Synthetic
gccccaggaucccagauua

SEQ ID NO: 12091 - RNA, 19 nt, Artificial Sequence
  Synthetic
ggagacugcucgggaagcu

SEQ ID NO: 12092 - RNA, 19 nt, Artificial Sequence
  Synthetic
ucaaugcccaugagccuuu

SEQ ID NO: 12093 - RNA, 19 nt, Artificial Sequence
  Synthetic
caagaguguccaguaugua

SEQ ID NO: 12094 - RNA, 19 nt, Artificial Sequence
  Synthetic
gagaagguugucccgcuuu

SEQ ID NO: 12095 - RNA, 19 nt, Artificial Sequence
  Synthetic
gaagcuguggucagugugu

SEQ ID NO: 12096 - RNA, 19 nt, Artificial Sequence
  Synthetic
gaucagcagagagaagguu

SEQ ID NO: 12097 - RNA, 19 nt, Artificial Sequence
  Synthetic
ggcaagaguguccaguaug

SEQ ID NO: 12098 - RNA, 19 nt, Artificial Sequence
  Synthetic
gggcuuccacuucucauuu

SEQ ID NO: 12099 - RNA, 19 nt, Artificial Sequence
  Synthetic
ucgggaagcuguggucagu

SEQ ID NO: 12100 - RNA, 19 nt, Artificial Sequence
  Synthetic
cauuugguguuggugcuuu

SEQ ID NO: 12101 - RNA, 19 nt, Artificial Sequence
  Synthetic
uuccagccauuuggugaua

SEQ ID NO: 12102 - RNA, 19 nt, Artificial Sequence
  Synthetic
cccaggaucccagauuaaa

SEQ ID NO: 12103 - RNA, 19 nt, Artificial Sequence
  Synthetic
ggcgcgaccuucgaaugua

SEQ ID NO: 12104 - RNA, 19 nt, Artificial Sequence
  Synthetic
guggccaccuguacuguug

SEQ ID NO: 12105 - RNA, 19 nt, Artificial Sequence
  Synthetic
gaagguugucccgcuuuau

SEQ ID NO: 12106 - RNA, 19 nt, Artificial Sequence
  Synthetic
ggauucccucuuccuguuu

SEQ ID NO: 12107 - RNA, 19 nt, Artificial Sequence
  Synthetic
ucaccaccgucuucaaugc

SEQ ID NO: 12108 - RNA, 19 nt, Artificial Sequence
  Synthetic
ggcuuccacuucucauuug

SEQ ID NO: 12109 - RNA, 19 nt, Artificial Sequence
  Synthetic
agucagaacuucaaagaaa

SEQ ID NO: 12110 - RNA, 19 nt, Artificial Sequence
  Synthetic
gcacaauucaguagguuaa

SEQ ID NO: 12111 - RNA, 19 nt, Artificial Sequence
  Synthetic
gagcauaacaguauugaua

SEQ ID NO: 12112 - RNA, 19 nt, Artificial Sequence
  Synthetic
ggaaacaagcucaggcaau

SEQ ID NO: 12113 - RNA, 19 nt, Artificial Sequence
  Synthetic
ucagaagucccuagagaaa

SEQ ID NO: 12114 - RNA, 19 nt, Artificial Sequence
  Synthetic
gguaaaaucuguaguguuu

SEQ ID NO: 12115 - RNA, 19 nt, Artificial Sequence
  Synthetic
ggagaagauuauacagaca

SEQ ID NO: 12116 - RNA, 19 nt, Artificial Sequence
  Synthetic
agguagaacucgagucuuu

SEQ ID NO: 12117 - RNA, 19 nt, Artificial Sequence
  Synthetic
ccaaagagcagauugacaa

SEQ ID NO: 12118 - RNA, 19 nt, Artificial Sequence
  Synthetic
gaaaauagagaucgggaua

SEQ ID NO: 12119 - RNA, 19 nt, Artificial Sequence
  Synthetic
gauuagagccaauaagauu

SEQ ID NO: 12120 - RNA, 19 nt, Artificial Sequence
  Synthetic
gaacgagaacgcagaggua

SEQ ID NO: 12121 - RNA, 19 nt, Artificial Sequence
  Synthetic
ggaacgaauuacagagacu

SEQ ID NO: 12122 - RNA, 19 nt, Artificial Sequence
  Synthetic
gaugaagauuaucggcuua

SEQ ID NO: 12123 - RNA, 19 nt, Artificial Sequence
  Synthetic
gcauauggcacaauguuua

SEQ ID NO: 12124 - RNA, 19 nt, Artificial Sequence
  Synthetic
ggacaaaaugggaaccaaa

SEQ ID NO: 12125 - RNA, 19 nt, Artificial Sequence
  Synthetic
ggagaagaauccagcagau

SEQ ID NO: 12126 - RNA, 19 nt, Artificial Sequence
  Synthetic
ggucuaacauagcaaacaa

SEQ ID NO: 12127 - RNA, 19 nt, Artificial Sequence
  Synthetic
ccacguaaaucaugaaaau

SEQ ID NO: 12128 - RNA, 19 nt, Artificial Sequence
  Synthetic
cuugagagauggaacgaau

SEQ ID NO: 12129 - RNA, 19 nt, Artificial Sequence
  Synthetic
gcugaauguuugcuauaua

SEQ ID NO: 12130 - RNA, 19 nt, Artificial Sequence
  Synthetic
gaaaggggauucagauaua

SEQ ID NO: 12131 - RNA, 19 nt, Artificial Sequence
  Synthetic
gagaagaggccuauuauca

SEQ ID NO: 12132 - RNA, 19 nt, Artificial Sequence
  Synthetic
gaaacaagcucaggcaauu

SEQ ID NO: 12133 - RNA, 19 nt, Artificial Sequence
  Synthetic
caucagaagaacugcaaca

SEQ ID NO: 12134 - RNA, 19 nt, Artificial Sequence
  Synthetic
gcaaauagaacucgaucca

SEQ ID NO: 12135 - RNA, 19 nt, Artificial Sequence
  Synthetic
ugaugaugaugaucgaaua

SEQ ID NO: 12136 - RNA, 19 nt, Artificial Sequence
  Synthetic
gcauaacaguauugauagu

SEQ ID NO: 12137 - RNA, 19 nt, Artificial Sequence
  Synthetic
agaugguggcagugaagaa

SEQ ID NO: 12138 - RNA, 19 nt, Artificial Sequence
  Synthetic
ccaaucaggugguagugaa

SEQ ID NO: 12139 - RNA, 19 nt, Artificial Sequence
  Synthetic
ggaaagagcuccaaauuga

SEQ ID NO: 12140 - RNA, 19 nt, Artificial Sequence
  Synthetic
cguggaagacggagaggaa

SEQ ID NO: 12141 - RNA, 19 nt, Artificial Sequence
  Synthetic
gcuuaugguugaucaguua

SEQ ID NO: 12142 - RNA, 19 nt, Artificial Sequence
  Synthetic
gguccaaagaaucggcaaa

SEQ ID NO: 12143 - RNA, 19 nt, Artificial Sequence
  Synthetic
ucaucaaagccuugguuua

SEQ ID NO: 12144 - RNA, 19 nt, Artificial Sequence
  Synthetic
ccaaagaaucggcaaauga

SEQ ID NO: 12145 - RNA, 19 nt, Artificial Sequence
  Synthetic
gcuuagaagugcuauaaaa

SEQ ID NO: 12146 - RNA, 19 nt, Artificial Sequence
  Synthetic
ggaagcaguuucagagaac

SEQ ID NO: 12147 - RNA, 19 nt, Artificial Sequence
  Synthetic
ccaaauugaaucaccuuua

SEQ ID NO: 12148 - RNA, 19 nt, Artificial Sequence
  Synthetic
ucuuagaugucaagcugaa

SEQ ID NO: 12149 - RNA, 19 nt, Artificial Sequence
  Synthetic
cggcaaaugagagugguua

SEQ ID NO: 12150 - RNA, 19 nt, Artificial Sequence
  Synthetic
uacaaaggcuagaacacua

SEQ ID NO: 12151 - RNA, 19 nt, Artificial Sequence
  Synthetic
aagccuugguuuagcauuu

SEQ ID NO: 12152 - RNA, 19 nt, Artificial Sequence
  Synthetic
uggaagacggagaggaaac

SEQ ID NO: 12153 - RNA, 19 nt, Artificial Sequence
  Synthetic
uggaagcaguuucagagaa

SEQ ID NO: 12154 - RNA, 19 nt, Artificial Sequence
  Synthetic
ccgacguggaagacggaga

SEQ ID NO: 12155 - RNA, 19 nt, Artificial Sequence
  Synthetic
augucaagcugaaaacaaa

SEQ ID NO: 12156 - RNA, 19 nt, Artificial Sequence
  Synthetic
ucaaauaggagccgaugga

SEQ ID NO: 12157 - RNA, 19 nt, Artificial Sequence
  Synthetic
gcaaaugagagugguuaga

SEQ ID NO: 12158 - RNA, 19 nt, Artificial Sequence
  Synthetic
ucucugugauuaagaagau

SEQ ID NO: 12159 - RNA, 19 nt, Artificial Sequence
  Synthetic
aaggaaagagcuccaaauu

SEQ ID NO: 12160 - RNA, 19 nt, Artificial Sequence
  Synthetic
aaaggaaagagcuccaaau

SEQ ID NO: 12161 - RNA, 19 nt, Artificial Sequence
  Synthetic
aauaggagccgauggaucu

SEQ ID NO: 12162 - RNA, 19 nt, Artificial Sequence
  Synthetic
gaaagagcuccaaauugaa

SEQ ID NO: 12163 - RNA, 19 nt, Artificial Sequence
  Synthetic
aaaugagagugguuagaag

SEQ ID NO: 12164 - RNA, 19 nt, Artificial Sequence
  Synthetic
guucagagcccugguggau

SEQ ID NO: 12165 - RNA, 19 nt, Artificial Sequence
  Synthetic
acacagcuuagaagugcua

SEQ ID NO: 12166 - RNA, 19 nt, Artificial Sequence
  Synthetic
acaaacaagaggacugugu

SEQ ID NO: 12167 - RNA, 19 nt, Artificial Sequence
  Synthetic
acaagauguucucccucaa

SEQ ID NO: 12168 - RNA, 19 nt, Artificial Sequence
  Synthetic
cagcuuagaagugcuauaa

SEQ ID NO: 12169 - RNA, 19 nt, Artificial Sequence
  Synthetic
caaagaaaguugugcaaau

SEQ ID NO: 12170 - RNA, 19 nt, Artificial Sequence
  Synthetic
ggagauagcccaaggagaa

SEQ ID NO: 12171 - RNA, 19 nt, Artificial Sequence
  Synthetic
gcauaugaauccuaggaaa

SEQ ID NO: 12172 - RNA, 19 nt, Artificial Sequence
  Synthetic
ggacaauuauggacaacaa

SEQ ID NO: 12173 - RNA, 19 nt, Artificial Sequence
  Synthetic
ccaaggaagagaaggagaa

SEQ ID NO: 12174 - RNA, 19 nt, Artificial Sequence
  Synthetic
gcaaagagauuguucugaa

SEQ ID NO: 12175 - RNA, 19 nt, Artificial Sequence
  Synthetic
aggaagagaaggagaagau

SEQ ID NO: 12176 - RNA, 19 nt, Artificial Sequence
  Synthetic
cgaaagaguuauuugaguu

SEQ ID NO: 12177 - RNA, 19 nt, Artificial Sequence
  Synthetic
ggaugaagcggaagauaga

SEQ ID NO: 12178 - RNA, 19 nt, Artificial Sequence
  Synthetic
cuacaugucgaaagaguua

SEQ ID NO: 12179 - RNA, 19 nt, Artificial Sequence
  Synthetic
uuaagagaguacagacaua

SEQ ID NO: 12180 - RNA, 19 nt, Artificial Sequence
  Synthetic
gaaugaugugcuagagaau

SEQ ID NO: 12181 - RNA, 19 nt, Artificial Sequence
  Synthetic
gcucauagauuacaaccaa

SEQ ID NO: 12182 - RNA, 19 nt, Artificial Sequence
  Synthetic
aaauacagaugcaggaaaa

SEQ ID NO: 12183 - RNA, 19 nt, Artificial Sequence
  Synthetic
aggcaagaguggagcaacu

SEQ ID NO: 12184 - RNA, 19 nt, Artificial Sequence
  Synthetic
gaacaaagaauuagagcag

SEQ ID NO: 12185 - RNA, 19 nt, Artificial Sequence
  Synthetic
ugugauaggcauucaauaa

SEQ ID NO: 12186 - RNA, 19 nt, Artificial Sequence
  Synthetic
ggaaauucaguuuggauga

SEQ ID NO: 12187 - RNA, 19 nt, Artificial Sequence
  Synthetic
agccaagaacaaagaauua

SEQ ID NO: 12188 - RNA, 19 nt, Artificial Sequence
  Synthetic
gagcuaaaucgcagcaaga

SEQ ID NO: 12189 - RNA, 19 nt, Artificial Sequence
  Synthetic
cauaaaggguuggaaacua

SEQ ID NO: 12190 - RNA, 19 nt, Artificial Sequence
  Synthetic
gcucuaagggcauuugaaa

SEQ ID NO: 12191 - RNA, 19 nt, Artificial Sequence
  Synthetic
agaccaaggaagagaagga

SEQ ID NO: 12192 - RNA, 19 nt, Artificial Sequence
  Synthetic
agaaugagcuccaauguau

SEQ ID NO: 12193 - RNA, 19 nt, Artificial Sequence
  Synthetic
aagaauuagagcagaccaa

SEQ ID NO: 12194 - RNA, 19 nt, Artificial Sequence
  Synthetic
gaagaagacugggagacaa

SEQ ID NO: 12195 - RNA, 19 nt, Artificial Sequence
  Synthetic
gacuguaggacgaggauuu

SEQ ID NO: 12196 - RNA, 19 nt, Artificial Sequence
  Synthetic
uuacagauguuuaagguga

SEQ ID NO: 12197 - RNA, 19 nt, Artificial Sequence
  Synthetic
agaaggacuuugaagcaau

SEQ ID NO: 12198 - RNA, 19 nt, Artificial Sequence
  Synthetic
ccaaagucacagagguuca

SEQ ID NO: 12199 - RNA, 19 nt, Artificial Sequence
  Synthetic
ggauaaaguucgucaguuu

SEQ ID NO: 12200 - RNA, 19 nt, Artificial Sequence
  Synthetic
ggacugaacugaagaucaa

SEQ ID NO: 12201 - RNA, 19 nt, Artificial Sequence
  Synthetic
gaagauaguaggaguuaaa

SEQ ID NO: 12202 - RNA, 19 nt, Artificial Sequence
  Synthetic
aauaaaagcugcagugaaa

SEQ ID NO: 12203 - RNA, 19 nt, Artificial Sequence
  Synthetic
ggucuaggguugauauuaa

SEQ ID NO: 12204 - RNA, 19 nt, Artificial Sequence
  Synthetic
ccagagagagugagagaga

SEQ ID NO: 12205 - RNA, 19 nt, Artificial Sequence
  Synthetic
gaaauagacuagaaagcuu

SEQ ID NO: 12206 - RNA, 19 nt, Artificial Sequence
  Synthetic
gaacaagaauugaaagaac

SEQ ID NO: 12207 - RNA, 19 nt, Artificial Sequence
  Synthetic
gauuuaauguggugugauu

SEQ ID NO: 12208 - RNA, 19 nt, Artificial Sequence
  Synthetic
cagaauaaccgacaugaaa

SEQ ID NO: 12209 - RNA, 19 nt, Artificial Sequence
  Synthetic
gacugaggguugagacaaa

SEQ ID NO: 12210 - RNA, 19 nt, Artificial Sequence
  Synthetic
gcaaagaauccaggacaaa

SEQ ID NO: 12211 - RNA, 19 nt, Artificial Sequence
  Synthetic
ugagagagauugacagaga

SEQ ID NO: 12212 - RNA, 19 nt, Artificial Sequence
  Synthetic
ccacgaaauucaaucuuua

SEQ ID NO: 12213 - RNA, 19 nt, Artificial Sequence
  Synthetic
ggaugugacagcauagaaa

SEQ ID NO: 12214 - RNA, 19 nt, Artificial Sequence
  Synthetic
gaaagaaccaggacgauuu

SEQ ID NO: 12215 - RNA, 19 nt, Artificial Sequence
  Synthetic
aaucaucgcagaaggauaa

SEQ ID NO: 12216 - RNA, 19 nt, Artificial Sequence
  Synthetic
gcauuaguguguugauuau

SEQ ID NO: 12217 - RNA, 19 nt, Artificial Sequence
  Synthetic
gugcuuaauggaagauuua

SEQ ID NO: 12218 - RNA, 19 nt, Artificial Sequence
  Synthetic
ugcaaagaauccaggacaa

SEQ ID NO: 12219 - RNA, 19 nt, Artificial Sequence
  Synthetic
acaguuggcauaagaauua

SEQ ID NO: 12220 - RNA, 19 nt, Artificial Sequence
  Synthetic
aggauuagaucuagaaaug

SEQ ID NO: 12221 - RNA, 19 nt, Artificial Sequence
  Synthetic
aguuagaacagcuguacaa

SEQ ID NO: 12222 - RNA, 19 nt, Artificial Sequence
  Synthetic
aaguuaagguuguucacua

SEQ ID NO: 12223 - RNA, 19 nt, Artificial Sequence
  Synthetic
uggaacaagaauugaaaga

SEQ ID NO: 12224 - RNA, 19 nt, Artificial Sequence
  Synthetic
acaaagacccucaagauga

SEQ ID NO: 12225 - RNA, 19 nt, Artificial Sequence
  Synthetic
uugaugacuuuguggaauu

SEQ ID NO: 12226 - RNA, 19 nt, Artificial Sequence
  Synthetic
cuacauaauuggacuucau

SEQ ID NO: 12227 - RNA, 19 nt, Artificial Sequence
  Synthetic
ccaagauggaacaagaauu

SEQ ID NO: 12228 - RNA, 19 nt, Artificial Sequence
  Synthetic
gaguuaugguuauugguuu

SEQ ID NO: 12229 - RNA, 19 nt, Artificial Sequence
  Synthetic
ugaaaagaguguagagaua

SEQ ID NO: 12230 - RNA, 19 nt, Artificial Sequence
  Synthetic
gcucaagccuggagaaaga

SEQ ID NO: 12231 - RNA, 19 nt, Artificial Sequence
  Synthetic
cagaaaucuuccagaauua

SEQ ID NO: 12232 - RNA, 19 nt, Artificial Sequence
  Synthetic
ccaagagaaucaaaggaaa

SEQ ID NO: 12233 - RNA, 19 nt, Artificial Sequence
  Synthetic
ggaagaagucaaagcgauu

SEQ ID NO: 12234 - RNA, 19 nt, Artificial Sequence
  Synthetic
gcaaggagcaugaaagaau

SEQ ID NO: 12235 - RNA, 19 nt, Artificial Sequence
  Synthetic
aaacaugggcugaaaguua

SEQ ID NO: 12236 - RNA, 19 nt, Artificial Sequence
  Synthetic
gcaaugaaguuacuggaaa

SEQ ID NO: 12237 - RNA, 19 nt, Artificial Sequence
  Synthetic
cuuuaaugauggaggaaga

SEQ ID NO: 12238 - RNA, 19 nt, Artificial Sequence
  Synthetic
caaugaaguuacuggaaaa

SEQ ID NO: 12239 - RNA, 19 nt, Artificial Sequence
  Synthetic
ggagaaacuuuguccagaa

SEQ ID NO: 12240 - RNA, 19 nt, Artificial Sequence
  Synthetic
gcaugaaacaaauggaaga

SEQ ID NO: 12241 - RNA, 19 nt, Artificial Sequence
  Synthetic
cuuuggagcugguggagaa

SEQ ID NO: 12242 - RNA, 19 nt, Artificial Sequence
  Synthetic
agucaaagcgauuaacuua

SEQ ID NO: 12243 - RNA, 19 nt, Artificial Sequence
  Synthetic
gagaagaguuugagaucgu

SEQ ID NO: 12244 - RNA, 19 nt, Artificial Sequence
  Synthetic
cgaauuacagcacgagaaa

SEQ ID NO: 12245 - RNA, 19 nt, Artificial Sequence
  Synthetic
gcugaagauggaagauaua

SEQ ID NO: 12246 - RNA, 19 nt, Artificial Sequence
  Synthetic
gaacaagcccuccaggaaa

SEQ ID NO: 12247 - RNA, 19 nt, Artificial Sequence
  Synthetic
ugaaagugcuuauagacaa

SEQ ID NO: 12248 - RNA, 19 nt, Artificial Sequence
  Synthetic
ggaaauugcaaugaaguua

SEQ ID NO: 12249 - RNA, 19 nt, Artificial Sequence
  Synthetic
ggaacaagcccuccaggaa

SEQ ID NO: 12250 - RNA, 19 nt, Artificial Sequence
  Synthetic
gaaagugcuuauagacaau

SEQ ID NO: 12251 - RNA, 19 nt, Artificial Sequence
  Synthetic
gagaaucaaaggaaagaau

SEQ ID NO: 12252 - RNA, 19 nt, Artificial Sequence
  Synthetic
gcgaauuacagcacgagaa

SEQ ID NO: 12253 - RNA, 19 nt, Artificial Sequence
  Synthetic
aauuacagcacgagaaaga

SEQ ID NO: 12254 - RNA, 19 nt, Artificial Sequence
  Synthetic
aaaagaaacuggcagauua

SEQ ID NO: 12255 - RNA, 19 nt, Artificial Sequence
  Synthetic
gaaagaugacgaagcgaca

SEQ ID NO: 12256 - RNA, 19 nt, Artificial Sequence
  Synthetic
agauagauggcuuggaaaa

SEQ ID NO: 12257 - RNA, 19 nt, Artificial Sequence
  Synthetic
ccucaaacaugggcugaaa

SEQ ID NO: 12258 - RNA, 19 nt, Artificial Sequence
  Synthetic
gguuggaguaauagauuuu

SEQ ID NO: 12259 - RNA, 19 nt, Artificial Sequence
  Synthetic
agccaaaucucuagaaaua

SEQ ID NO: 12260 - RNA, 19 nt, Artificial Sequence
  Synthetic
cagcagacauccugaagaa

SEQ ID NO: 12261 - RNA, 19 nt, Artificial Sequence
  Synthetic
uggaagagauauaagagaa

SEQ ID NO: 12262 - RNA, 19 nt, Artificial Sequence
  Synthetic
gcacaaagagauucaauuu

SEQ ID NO: 12263 - RNA, 19 nt, Artificial Sequence
  Synthetic
gccaggaagcucagugaaa

SEQ ID NO: 12264 - RNA, 19 nt, Artificial Sequence
  Synthetic
ggguugauguguuuagcaa

SEQ ID NO: 12265 - RNA, 19 nt, Artificial Sequence
  Synthetic
ggagaagacgucagcugaa

SEQ ID NO: 12266 - RNA, 19 nt, Artificial Sequence
  Synthetic
gcagacauccugaagaaau

SEQ ID NO: 12267 - RNA, 19 nt, Artificial Sequence
  Synthetic
ggagaauagccaacaagau

SEQ ID NO: 12268 - RNA, 19 nt, Artificial Sequence
  Synthetic
cagcacaaccuuuggcuuu

SEQ ID NO: 12269 - RNA, 19 nt, Artificial Sequence
  Synthetic
gguguugacugcacuaaua

SEQ ID NO: 12270 - RNA, 19 nt, Artificial Sequence
  Synthetic
guugauguguuuagcaaga

SEQ ID NO: 12271 - RNA, 19 nt, Artificial Sequence
  Synthetic
uggaggagacaauugaaua

SEQ ID NO: 12272 - RNA, 19 nt, Artificial Sequence
  Synthetic
ggagccaaaucucuagaaa

SEQ ID NO: 12273 - RNA, 19 nt, Artificial Sequence
  Synthetic
caauuucccuggaggauca

SEQ ID NO: 12274 - RNA, 19 nt, Artificial Sequence
  Synthetic
ucagaaagcacaaagagau

SEQ ID NO: 12275 - RNA, 19 nt, Artificial Sequence
  Synthetic
ggccauuguuuguuuauau

SEQ ID NO: 12276 - RNA, 19 nt, Artificial Sequence
  Synthetic
gagaauagccaacaagaug

SEQ ID NO: 12277 - RNA, 19 nt, Artificial Sequence
  Synthetic
gguagaagaaagagagaaa

SEQ ID NO: 12278 - RNA, 19 nt, Artificial Sequence
  Synthetic
ggaaaguaaaugagagaga

SEQ ID NO: 12279 - RNA, 19 nt, Artificial Sequence
  Synthetic
caggauaacaguuggauaa

SEQ ID NO: 12280 - RNA, 19 nt, Artificial Sequence
  Synthetic
cagaaaugaugcugcuaaa

SEQ ID NO: 12281 - RNA, 19 nt, Artificial Sequence
  Synthetic
ggacauauguggagaauag

SEQ ID NO: 12282 - RNA, 19 nt, Artificial Sequence
  Synthetic
caacagaucugcugaaaga

SEQ ID NO: 12283 - RNA, 19 nt, Artificial Sequence
  Synthetic
ucacaaacaaccaaagaaa

SEQ ID NO: 12284 - RNA, 19 nt, Artificial Sequence
  Synthetic
aaacaaaagcagugaacaa

SEQ ID NO: 12285 - RNA, 19 nt, Artificial Sequence
  Synthetic
cagaagaagugaagaccuu

SEQ ID NO: 12286 - RNA, 19 nt, Artificial Sequence
  Synthetic
gaacuuucuuacaggauaa

SEQ ID NO: 12287 - RNA, 19 nt, Artificial Sequence
  Synthetic
gagcaaauccaaagguaga

SEQ ID NO: 12288 - RNA, 19 nt, Artificial Sequence
  Synthetic
ccugaaagaaacagaacua

SEQ ID NO: 12289 - RNA, 19 nt, Artificial Sequence
  Synthetic
ggacagauaaagauggcaa

SEQ ID NO: 12290 - RNA, 19 nt, Artificial Sequence
  Synthetic
ggugauaguauuuggauuu

SEQ ID NO: 12291 - RNA, 19 nt, Artificial Sequence
  Synthetic
ugacaaaggugaagaauug

SEQ ID NO: 12292 - RNA, 19 nt, Artificial Sequence
  Synthetic
caaaguaaauccugcagua

SEQ ID NO: 12293 - RNA, 19 nt, Artificial Sequence
  Synthetic
caggaaaguaaaugagaga

SEQ ID NO: 12294 - RNA, 19 nt, Artificial Sequence
  Synthetic
gauaacaguuggauaaaga

SEQ ID NO: 12295 - RNA, 19 nt, Artificial Sequence
  Synthetic
gugaaugccaggaugaaua

SEQ ID NO: 12296 - RNA, 19 nt, Artificial Sequence
  Synthetic
gcauuggacaggaaaguaa

SEQ ID NO: 12297 - RNA, 19 nt, Artificial Sequence
  Synthetic
acaaggaaaucaagaugaa

SEQ ID NO: 12298 - RNA, 19 nt, Artificial Sequence
  Synthetic
ccacaggaaaugagaugaa

SEQ ID NO: 12299 - RNA, 19 nt, Artificial Sequence
  Synthetic
ccaaagaccuuaauaacuu

SEQ ID NO: 12300 - RNA, 19 nt, Artificial Sequence
  Synthetic
ccaauguuaccuugagaaa

SEQ ID NO: 12301 - RNA, 19 nt, Artificial Sequence
  Synthetic
gcagauacauccaccuaaa

SEQ ID NO: 12302 - RNA, 19 nt, Artificial Sequence
  Synthetic
guaaagaagaagaggcagu

SEQ ID NO: 12303 - RNA, 19 nt, Artificial Sequence
  Synthetic
ugaaaauaccacuggaaaa

SEQ ID NO: 12304 - RNA, 19 nt, Artificial Sequence
  Synthetic
aaagaaacgcccugaagaa

SEQ ID NO: 12305 - RNA, 19 nt, Artificial Sequence
  Synthetic
ggacaggaucucagacaga

SEQ ID NO: 12306 - RNA, 19 nt, Artificial Sequence
  Synthetic
ggaaaugagaugaagagca

SEQ ID NO: 12307 - RNA, 19 nt, Artificial Sequence
  Synthetic
ggagcaaggaggagaggaa

SEQ ID NO: 12308 - RNA, 19 nt, Artificial Sequence
  Synthetic
ggucaacggcagagacuua

SEQ ID NO: 12309 - RNA, 19 nt, Artificial Sequence
  Synthetic
gugcagguguugagaagaa

SEQ ID NO: 12310 - RNA, 19 nt, Artificial Sequence
  Synthetic
augaugaagaagaggaaua

SEQ ID NO: 12311 - RNA, 19 nt, Artificial Sequence
  Synthetic
gaagaagaggaauaagaaa

SEQ ID NO: 12312 - RNA, 19 nt, Artificial Sequence
  Synthetic
agaagaagcacgacgaaga

SEQ ID NO: 12313 - RNA, 19 nt, Artificial Sequence
  Synthetic
ggaacgacuuucuggauga

SEQ ID NO: 12314 - RNA, 19 nt, Artificial Sequence
  Synthetic
gcaagcagucugaccgaaa

SEQ ID NO: 12315 - RNA, 19 nt, Artificial Sequence
  Synthetic
gaaugaacagccaggacaa

SEQ ID NO: 12316 - RNA, 19 nt, Artificial Sequence
  Synthetic
ggauggaugaugacaggaa

SEQ ID NO: 12317 - RNA, 19 nt, Artificial Sequence
  Synthetic
gcaaauucaugacaggauu

SEQ ID NO: 12318 - RNA, 19 nt, Artificial Sequence
  Synthetic
ccauaguggugcagguguu

SEQ ID NO: 12319 - RNA, 19 nt, Artificial Sequence
  Synthetic
cgacaucaccuuugaacau

SEQ ID NO: 12320 - RNA, 19 nt, Artificial Sequence
  Synthetic
agaugagccuggugagcau

SEQ ID NO: 12321 - RNA, 19 nt, Artificial Sequence
  Synthetic
agaugaugaagaagaggaa

SEQ ID NO: 12322 - RNA, 19 nt, Artificial Sequence
  Synthetic
augcagagcagguuggauu

SEQ ID NO: 12323 - RNA, 19 nt, Artificial Sequence
  Synthetic
gcauggaguggaaggugaa

SEQ ID NO: 12324 - RNA, 19 nt, Artificial Sequence
  Synthetic
augaagaagaggaauaaga

SEQ ID NO: 12325 - RNA, 19 nt, Artificial Sequence
  Synthetic
agaagucggccguggagua

SEQ ID NO: 12326 - RNA, 19 nt, Artificial Sequence
  Synthetic
gagaaauccgacaaggaca

SEQ ID NO: 12327 - RNA, 19 nt, Artificial Sequence
  Synthetic
aaguggaccucuacagaau

SEQ ID NO: 12328 - RNA, 19 nt, Artificial Sequence
  Synthetic
caaauucaugacaggauua

SEQ ID NO: 12329 - RNA, 19 nt, Artificial Sequence
  Synthetic
cgagaaggagaccgcauua

SEQ ID NO: 12330 - RNA, 19 nt, Artificial Sequence
  Synthetic
agacacgagcucucagaua

SEQ ID NO: 12331 - RNA, 19 nt, Artificial Sequence
  Synthetic
ccaaagagcucaaccacgu

SEQ ID NO: 12332 - RNA, 19 nt, Artificial Sequence
  Synthetic
agaagaacaccaaggacca

SEQ ID NO: 12333 - RNA, 19 nt, Artificial Sequence
  Synthetic
aggaaggaggccugcaaau

SEQ ID NO: 12334 - RNA, 19 nt, Artificial Sequence
  Synthetic
augaauacuacgauccaaa

SEQ ID NO: 12335 - RNA, 19 nt, Artificial Sequence
  Synthetic
ccggacggcacuagaguau

SEQ ID NO: 12336 - RNA, 19 nt, Artificial Sequence
  Synthetic
agcaaagagcggagagcca

SEQ ID NO: 12337 - RNA, 19 nt, Artificial Sequence
  Synthetic
cccagaagcuccagggaaa

SEQ ID NO: 12338 - RNA, 19 nt, Artificial Sequence
  Synthetic
aggcagaacuugaacuuaa

SEQ ID NO: 12339 - RNA, 19 nt, Artificial Sequence
  Synthetic
agacaaggaagcagacaaa

SEQ ID NO: 12340 - RNA, 19 nt, Artificial Sequence
  Synthetic
ggaaagaggaugaacuaga

SEQ ID NO: 12341 - RNA, 19 nt, Artificial Sequence
  Synthetic
agacaaguccucaggcuaa

SEQ ID NO: 12342 - RNA, 19 nt, Artificial Sequence
  Synthetic
gcagauuauuaaaccguua

SEQ ID NO: 12343 - RNA, 19 nt, Artificial Sequence
  Synthetic
gaagacaaguggaugaaaa

SEQ ID NO: 12344 - RNA, 19 nt, Artificial Sequence
  Synthetic
gaucguagguucucgaaau

SEQ ID NO: 12345 - RNA, 19 nt, Artificial Sequence
  Synthetic
caggaagcuuuguggaaaa

SEQ ID NO: 12346 - RNA, 19 nt, Artificial Sequence
  Synthetic
agaaggagauauuguguuu

SEQ ID NO: 12347 - RNA, 19 nt, Artificial Sequence
  Synthetic
ccaaagcauuauacaacua

SEQ ID NO: 12348 - RNA, 19 nt, Artificial Sequence
  Synthetic
guucaaaggcacauuacaa

SEQ ID NO: 12349 - RNA, 19 nt, Artificial Sequence
  Synthetic
gcuaagcagcugauagaau

SEQ ID NO: 12350 - RNA, 19 nt, Artificial Sequence
  Synthetic
gaacuuaaagaaggagaua

SEQ ID NO: 12351 - RNA, 19 nt, Artificial Sequence
  Synthetic
acaaggaagcagacaaaga

SEQ ID NO: 12352 - RNA, 19 nt, Artificial Sequence
  Synthetic
ccaggaagcuuuguggaaa

SEQ ID NO: 12353 - RNA, 19 nt, Artificial Sequence
  Synthetic
ggauaagccuccugugcca

SEQ ID NO: 12354 - RNA, 19 nt, Artificial Sequence
  Synthetic
ucggaaagaggaugaacua

SEQ ID NO: 12355 - RNA, 19 nt, Artificial Sequence
  Synthetic
aaacagaggccuuggaaac

SEQ ID NO: 12356 - RNA, 19 nt, Artificial Sequence
  Synthetic
ggacaguugcagcgcacaa

SEQ ID NO: 12357 - RNA, 19 nt, Artificial Sequence
  Synthetic
ccaccaacuuugugcagau

SEQ ID NO: 12358 - RNA, 19 nt, Artificial Sequence
  Synthetic
gcuaaagucccuaugucua

SEQ ID NO: 12359 - RNA, 19 nt, Artificial Sequence
  Synthetic
uauaaguaccaccggguua

SEQ ID NO: 12360 - RNA, 19 nt, Artificial Sequence
  Synthetic
aggaguugaugcuggagaa

SEQ ID NO: 12361 - RNA, 19 nt, Artificial Sequence
  Synthetic
cagcugauagaaugggaua

SEQ ID NO: 12362 - RNA, 19 nt, Artificial Sequence
  Synthetic
aggaaugcuggcagacaaa

SEQ ID NO: 12363 - RNA, 19 nt, Artificial Sequence
  Synthetic
aguugaugcuggagaaugu

SEQ ID NO: 12364 - RNA, 19 nt, Artificial Sequence
  Synthetic
augaacuagagcugagaaa

SEQ ID NO: 12365 - RNA, 19 nt, Artificial Sequence
  Synthetic
aaggaaugcuggcagacaa

SEQ ID NO: 12366 - RNA, 19 nt, Artificial Sequence
  Synthetic
caaacagaggccuuggaaa

SEQ ID NO: 12367 - RNA, 19 nt, Artificial Sequence
  Synthetic
aggcaaguuaggagauaaa

SEQ ID NO: 12368 - RNA, 19 nt, Artificial Sequence
  Synthetic
agaacugggcagaaggcaa

SEQ ID NO: 12369 - RNA, 19 nt, Artificial Sequence
  Synthetic
gcucgaugucacagccaaa

SEQ ID NO: 12370 - RNA, 19 nt, Artificial Sequence
  Synthetic
gagccaaaccucaccgcaa

SEQ ID NO: 12371 - RNA, 19 nt, Artificial Sequence
  Synthetic
aggacaagagugagaacca

SEQ ID NO: 12372 - RNA, 19 nt, Artificial Sequence
  Synthetic
gggcaaggcggaagaggaa

SEQ ID NO: 12373 - RNA, 19 nt, Artificial Sequence
  Synthetic
ggaugcagcuagaggauga

SEQ ID NO: 12374 - RNA, 19 nt, Artificial Sequence
  Synthetic
gugaguggcuccagggaca

SEQ ID NO: 12375 - RNA, 19 nt, Artificial Sequence
  Synthetic
ccuggagggugcagugaua

SEQ ID NO: 12376 - RNA, 19 nt, Artificial Sequence
  Synthetic
gcauauuguuagugcagga

SEQ ID NO: 12377 - RNA, 19 nt, Artificial Sequence
  Synthetic
ggaagagaguaugggaaga

SEQ ID NO: 12378 - RNA, 19 nt, Artificial Sequence
  Synthetic
gaagagaguaugggaagaa

SEQ ID NO: 12379 - RNA, 19 nt, Artificial Sequence
  Synthetic
gaaggaggcacaaggaaga

SEQ ID NO: 12380 - RNA, 19 nt, Artificial Sequence
  Synthetic
cugcugaaguggagaugca

SEQ ID NO: 12381 - RNA, 19 nt, Artificial Sequence
  Synthetic
aggaggaggaggaggagga

SEQ ID NO: 12382 - RNA, 19 nt, Artificial Sequence
  Synthetic
caggcuggcuguugagaca

SEQ ID NO: 12383 - RNA, 19 nt, Artificial Sequence
  Synthetic
gagugaaggugucucagaa

SEQ ID NO: 12384 - RNA, 19 nt, Artificial Sequence
  Synthetic
gcucaggcaccuugcacua

SEQ ID NO: 12385 - RNA, 19 nt, Artificial Sequence
  Synthetic
uguacauaucccaggcuaa

SEQ ID NO: 12386 - RNA, 19 nt, Artificial Sequence
  Synthetic
gggaagauuggcauucaua

SEQ ID NO: 12387 - RNA, 19 nt, Artificial Sequence
  Synthetic
gggaaggaggcacaaggaa

SEQ ID NO: 12388 - RNA, 19 nt, Artificial Sequence
  Synthetic
ggaaaugugucauggagug

SEQ ID NO: 12389 - RNA, 19 nt, Artificial Sequence
  Synthetic
cuaauuucauccuggccua

SEQ ID NO: 12390 - RNA, 19 nt, Artificial Sequence
  Synthetic
cucaugaacaggaggugaa

SEQ ID NO: 12391 - RNA, 19 nt, Artificial Sequence
  Synthetic
ggaagauuggcauucauaa

SEQ ID NO: 12392 - RNA, 19 nt, Artificial Sequence
  Synthetic
guugagacaugcuacaauu

SEQ ID NO: 12393 - RNA, 19 nt, Artificial Sequence
  Synthetic
cauccagacugaagaccga

SEQ ID NO: 12394 - RNA, 19 nt, Artificial Sequence
  Synthetic
gagaguaugggaagaagga

SEQ ID NO: 12395 - RNA, 19 nt, Artificial Sequence
  Synthetic
ugaacuguguggauugcaa

SEQ ID NO: 12396 - RNA, 19 nt, Artificial Sequence
  Synthetic
ggaugggaagauuggcauu

SEQ ID NO: 12397 - RNA, 19 nt, Artificial Sequence
  Synthetic
cggaaaugugucauggagu

SEQ ID NO: 12398 - RNA, 19 nt, Artificial Sequence
  Synthetic
aaguggagaugcagucaga

SEQ ID NO: 12399 - RNA, 19 nt, Artificial Sequence
  Synthetic
cuuuggagcuuaccagaga

SEQ ID NO: 12400 - RNA, 19 nt, Artificial Sequence
  Synthetic
gaacuguguggauugcaaa

SEQ ID NO: 12401 - RNA, 19 nt, Artificial Sequence
  Synthetic
gcaccuucacugucaagua

SEQ ID NO: 12402 - RNA, 19 nt, Artificial Sequence
  Synthetic
aggugaagauguagagaaa

SEQ ID NO: 12403 - RNA, 19 nt, Artificial Sequence
  Synthetic
gcacagaguuuaauugaaa

SEQ ID NO: 12404 - RNA, 19 nt, Artificial Sequence
  Synthetic
gugaagauguagagaaaca

SEQ ID NO: 12405 - RNA, 19 nt, Artificial Sequence
  Synthetic
agggaaaaguggugaauua

SEQ ID NO: 12406 - RNA, 19 nt, Artificial Sequence
  Synthetic
augcaaagugugugaauua

SEQ ID NO: 12407 - RNA, 19 nt, Artificial Sequence
  Synthetic
gaacaggagucuuuugaaa

SEQ ID NO: 12408 - RNA, 19 nt, Artificial Sequence
  Synthetic
uauuauaaguccaggagaa

SEQ ID NO: 12409 - RNA, 19 nt, Artificial Sequence
  Synthetic
gaucaaaggccaugguuuu

SEQ ID NO: 12410 - RNA, 19 nt, Artificial Sequence
  Synthetic
cggaggaacacaaaggaaa

SEQ ID NO: 12411 - RNA, 19 nt, Artificial Sequence
  Synthetic
cuacaaaagaagagaagaa

SEQ ID NO: 12412 - RNA, 19 nt, Artificial Sequence
  Synthetic
gauaagaagagguguucaa

SEQ ID NO: 12413 - RNA, 19 nt, Artificial Sequence
  Synthetic
aagcauggaagaaggaaua

SEQ ID NO: 12414 - RNA, 19 nt, Artificial Sequence
  Synthetic
guguauauguggugaacuu

SEQ ID NO: 12415 - RNA, 19 nt, Artificial Sequence
  Synthetic
ugauaaagcuguugcuaca

SEQ ID NO: 12416 - RNA, 19 nt, Artificial Sequence
  Synthetic
caaagaaagaugugauuga

SEQ ID NO: 12417 - RNA, 19 nt, Artificial Sequence
  Synthetic
guucaaaaguggugagcuu

SEQ ID NO: 12418 - RNA, 19 nt, Artificial Sequence
  Synthetic
gggaaagaauuacaaggaa

SEQ ID NO: 12419 - RNA, 19 nt, Artificial Sequence
  Synthetic
cugcaauauuugaggagau

SEQ ID NO: 12420 - RNA, 19 nt, Artificial Sequence
  Synthetic
gcaccgaauuggacagaca

SEQ ID NO: 12421 - RNA, 19 nt, Artificial Sequence
  Synthetic
gcugaaaacugcugagaga

SEQ ID NO: 12422 - RNA, 19 nt, Artificial Sequence
  Synthetic
caggagaaaucgcaguaaa

SEQ ID NO: 12423 - RNA, 19 nt, Artificial Sequence
  Synthetic
ggaaagaauuacaaggaag

SEQ ID NO: 12424 - RNA, 19 nt, Artificial Sequence
  Synthetic
gggcaauaagugagacaga

SEQ ID NO: 12425 - RNA, 19 nt, Artificial Sequence
  Synthetic
aagaaagaaugcaggcaau

SEQ ID NO: 12426 - RNA, 19 nt, Artificial Sequence
  Synthetic
gcuaauagacacugaauca

SEQ ID NO: 12427 - RNA, 19 nt, Artificial Sequence
  Synthetic
uggagaaacaagagaagua

SEQ ID NO: 12428 - RNA, 19 nt, Artificial Sequence
  Synthetic
ccguaaaccuucaaaauua

SEQ ID NO: 12429 - RNA, 19 nt, Artificial Sequence
  Synthetic
uuugagaauuacuggguua

SEQ ID NO: 12430 - RNA, 19 nt, Artificial Sequence
  Synthetic
ggagguaggaauuguuuua

SEQ ID NO: 12431 - RNA, 19 nt, Artificial Sequence
  Synthetic
ggagaaaccagaacaugaa

SEQ ID NO: 12432 - RNA, 19 nt, Artificial Sequence
  Synthetic
cggagaaaccagaacauga

SEQ ID NO: 12433 - RNA, 19 nt, Artificial Sequence
  Synthetic
gcaagcaagccgagaacuu

SEQ ID NO: 12434 - RNA, 19 nt, Artificial Sequence
  Synthetic
ccuacagacuggaguugaa

SEQ ID NO: 12435 - RNA, 19 nt, Artificial Sequence
  Synthetic
cgacacagccauagcacau

SEQ ID NO: 12436 - RNA, 19 nt, Artificial Sequence
  Synthetic
cuuucuagcuacagacauu

SEQ ID NO: 12437 - RNA, 19 nt, Artificial Sequence
  Synthetic
accagaacaugaagacaua

SEQ ID NO: 12438 - RNA, 19 nt, Artificial Sequence
  Synthetic
caacaaaguucauuaaccu

SEQ ID NO: 12439 - RNA, 19 nt, Artificial Sequence
  Synthetic
caugaagacauaugugaau

SEQ ID NO: 12440 - RNA, 19 nt, Artificial Sequence
  Synthetic
ucuauagaucaguguguua

SEQ ID NO: 12441 - RNA, 19 nt, Artificial Sequence
  Synthetic
gcuaauaaacccugcagca

SEQ ID NO: 12442 - RNA, 19 nt, Artificial Sequence
  Synthetic
ccggagugcuuaucuuaaa

SEQ ID NO: 12443 - RNA, 19 nt, Artificial Sequence
  Synthetic
ggaaccuggcuauggagaa

SEQ ID NO: 12444 - RNA, 19 nt, Artificial Sequence
  Synthetic
gcacagggcuucuauagau

SEQ ID NO: 12445 - RNA, 19 nt, Artificial Sequence
  Synthetic
gagaauuacuggguuaaau

SEQ ID NO: 12446 - RNA, 19 nt, Artificial Sequence
  Synthetic
agaaacaagagaaguacga

SEQ ID NO: 12447 - RNA, 19 nt, Artificial Sequence
  Synthetic
cuaauaaacccugcagcaa

SEQ ID NO: 12448 - RNA, 19 nt, Artificial Sequence
  Synthetic
aagagaaguacgaaggcca

SEQ ID NO: 12449 - RNA, 19 nt, Artificial Sequence
  Synthetic
agugaucuuucaacaguaa

SEQ ID NO: 12450 - RNA, 19 nt, Artificial Sequence
  Synthetic
aacuauagauccacaugaa

SEQ ID NO: 12451 - RNA, 19 nt, Artificial Sequence
  Synthetic
ccauauuggucccuugaca

SEQ ID NO: 12452 - RNA, 19 nt, Artificial Sequence
  Synthetic
gacuggaguugaaugggaa

SEQ ID NO: 12453 - RNA, 19 nt, Artificial Sequence
  Synthetic
uggguuaaauuguggaaag

SEQ ID NO: 12454 - RNA, 19 nt, Artificial Sequence
  Synthetic
gaaaggguccagauuuuaa

SEQ ID NO: 12455 - RNA, 19 nt, Artificial Sequence
  Synthetic
aaccagaacaugaagacau

SEQ ID NO: 12456 - RNA, 19 nt, Artificial Sequence
  Synthetic
gagcaaagggagugacaaa

SEQ ID NO: 12457 - RNA, 19 nt, Artificial Sequence
  Synthetic
ggaaacggcugaagagcaa

SEQ ID NO: 12458 - RNA, 19 nt, Artificial Sequence
  Synthetic
caucuagacuuaagugaua

SEQ ID NO: 12459 - RNA, 19 nt, Artificial Sequence
  Synthetic
cagaaagaaucuccagaaa

SEQ ID NO: 12460 - RNA, 19 nt, Artificial Sequence
  Synthetic
ccucaaacauacagaacuu

SEQ ID NO: 12461 - RNA, 19 nt, Artificial Sequence
  Synthetic
acuugaacuuggagaaauu

SEQ ID NO: 12462 - RNA, 19 nt, Artificial Sequence
  Synthetic
ggagaaauucccacacuaa

SEQ ID NO: 12463 - RNA, 19 nt, Artificial Sequence
  Synthetic
gaaagaaucuccagaaauc

SEQ ID NO: 12464 - RNA, 19 nt, Artificial Sequence
  Synthetic
gcaaagggagugacaaaga

SEQ ID NO: 12465 - RNA, 19 nt, Artificial Sequence
  Synthetic
gugauagugucaugcuaaa

SEQ ID NO: 12466 - RNA, 19 nt, Artificial Sequence
  Synthetic
ggaugggauuccagcaaga

SEQ ID NO: 12467 - RNA, 19 nt, Artificial Sequence
  Synthetic
caucaaaugccgacugaca

SEQ ID NO: 12468 - RNA, 19 nt, Artificial Sequence
  Synthetic
acucaaauuuagugcgacu

SEQ ID NO: 12469 - RNA, 19 nt, Artificial Sequence
  Synthetic
agaaagaaucuccagaaau

SEQ ID NO: 12470 - RNA, 19 nt, Artificial Sequence
  Synthetic
gcugaagagcaaagggagu

SEQ ID NO: 12471 - RNA, 19 nt, Artificial Sequence
  Synthetic
ugucaauacucucgcaaaa

SEQ ID NO: 12472 - RNA, 19 nt, Artificial Sequence
  Synthetic
aaacucaaguccagccaua

SEQ ID NO: 12473 - RNA, 19 nt, Artificial Sequence
  Synthetic
guuccaaguugcagaaucu

SEQ ID NO: 12474 - RNA, 19 nt, Artificial Sequence
  Synthetic
cccaauugcuggaguacuu

SEQ ID NO: 12475 - RNA, 19 nt, Artificial Sequence
  Synthetic
gcuaaaggucucugguguu

SEQ ID NO: 12476 - RNA, 19 nt, Artificial Sequence
  Synthetic
aagaggagcccgacaguga

SEQ ID NO: 12477 - RNA, 19 nt, Artificial Sequence
  Synthetic
gagaaauucccacacuaaa

SEQ ID NO: 12478 - RNA, 19 nt, Artificial Sequence
  Synthetic
ccuucauucugcaaguaua

SEQ ID NO: 12479 - RNA, 19 nt, Artificial Sequence
  Synthetic
cagcaagacuucugaacug

SEQ ID NO: 12480 - RNA, 19 nt, Artificial Sequence
  Synthetic
cggaaacggcugaagagca

SEQ ID NO: 12481 - RNA, 19 nt, Artificial Sequence
  Synthetic
uaagcuaaaucgagagaac

SEQ ID NO: 12482 - RNA, 19 nt, Artificial Sequence
  Synthetic
acagaaagaaucuccagaa

SEQ ID NO: 12483 - RNA, 19 nt, Artificial Sequence
  Synthetic
agugauagugucaugcuaa

SEQ ID NO: 12484 - RNA, 19 nt, Artificial Sequence
  Synthetic
ucaaauuuagugcgacuua

SEQ ID NO: 12485 - RNA, 19 nt, Artificial Sequence
  Synthetic
cuggaaggccugcggcuuu

SEQ ID NO: 12486 - RNA, 19 nt, Artificial Sequence
  Synthetic
ggaaacaauaccagugaaa

SEQ ID NO: 12487 - RNA, 19 nt, Artificial Sequence
  Synthetic
ggaugauaguggaauaaua

SEQ ID NO: 12488 - RNA, 19 nt, Artificial Sequence
  Synthetic
gauagagaaugguggcaua

SEQ ID NO: 12489 - RNA, 19 nt, Artificial Sequence
  Synthetic
ggaauaauaaugugggauu

SEQ ID NO: 12490 - RNA, 19 nt, Artificial Sequence
  Synthetic
gaggagagaccaagaacaa

SEQ ID NO: 12491 - RNA, 19 nt, Artificial Sequence
  Synthetic
ggaagucauuugauagaaa

SEQ ID NO: 12492 - RNA, 19 nt, Artificial Sequence
  Synthetic
cgaaaugaaacaagccaaa

SEQ ID NO: 12493 - RNA, 19 nt, Artificial Sequence
  Synthetic
ggaugaaggacaugccaua

SEQ ID NO: 12494 - RNA, 19 nt, Artificial Sequence
  Synthetic
auaucaaggagaagaguaa

SEQ ID NO: 12495 - RNA, 19 nt, Artificial Sequence
  Synthetic
acuuaaagccucuggauuu

SEQ ID NO: 12496 - RNA, 19 nt, Artificial Sequence
  Synthetic
cgggaguaguuaauaauaa

SEQ ID NO: 12497 - RNA, 19 nt, Artificial Sequence
  Synthetic
ggagauaguccauuacaua

SEQ ID NO: 12498 - RNA, 19 nt, Artificial Sequence
  Synthetic
caaagggaacagugaauua

SEQ ID NO: 12499 - RNA, 19 nt, Artificial Sequence
  Synthetic
gaaaugagaucuagagaac

SEQ ID NO: 12500 - RNA, 19 nt, Artificial Sequence
  Synthetic
guauggaguucauggaaau

SEQ ID NO: 12501 - RNA, 19 nt, Artificial Sequence
  Synthetic
ccugguagaucaagcauua

SEQ ID NO: 12502 - RNA, 19 nt, Artificial Sequence
  Synthetic
gggcacacauugaagguau

SEQ ID NO: 12503 - RNA, 19 nt, Artificial Sequence
  Synthetic
aagcagugauucagaggaa

SEQ ID NO: 12504 - RNA, 19 nt, Artificial Sequence
  Synthetic
ccugaagaacugagaaaga

SEQ ID NO: 12505 - RNA, 19 nt, Artificial Sequence
  Synthetic
acagcuacauugagauaua

SEQ ID NO: 12506 - RNA, 19 nt, Artificial Sequence
  Synthetic
cuaugaaacuuggaggaaa

SEQ ID NO: 12507 - RNA, 19 nt, Artificial Sequence
  Synthetic
gaaugguggcauagaacaa

SEQ ID NO: 12508 - RNA, 19 nt, Artificial Sequence
  Synthetic
uuacaaagacaaagccuua

SEQ ID NO: 12509 - RNA, 19 nt, Artificial Sequence
  Synthetic
cauagaaagcagugauuca

SEQ ID NO: 12510 - RNA, 19 nt, Artificial Sequence
  Synthetic
gagaaggaccgaccagaaa

SEQ ID NO: 12511 - RNA, 19 nt, Artificial Sequence
  Synthetic
gcagaaaaugaaaggcaaa

SEQ ID NO: 12512 - RNA, 19 nt, Artificial Sequence
  Synthetic
cuuucuaacuagugaugaa

SEQ ID NO: 12513 - RNA, 19 nt, Artificial Sequence
  Synthetic
ucagaaagaagauggguuu

SEQ ID NO: 12514 - RNA, 19 nt, Artificial Sequence
  Synthetic
aagaagaaucccaacauaa

SEQ ID NO: 12515 - RNA, 19 nt, Artificial Sequence
  Synthetic
uagcaauacuucagugaga

SEQ ID NO: 12516 - RNA, 19 nt, Artificial Sequence
  Synthetic
gagaggagcuagagccaaa

SEQ ID NO: 12517 - RNA, 19 nt, Artificial Sequence
  Synthetic
aggaagacauugagaagaa

SEQ ID NO: 12518 - RNA, 19 nt, Artificial Sequence
  Synthetic
gaagauuguugguguguaa

SEQ ID NO: 12519 - RNA, 19 nt, Artificial Sequence
  Synthetic
uggaagaagugaugaagaa

SEQ ID NO: 12520 - RNA, 19 nt, Artificial Sequence
  Synthetic
cagcagaacauuuggaaga

SEQ ID NO: 12521 - RNA, 19 nt, Artificial Sequence
  Synthetic
gcacagacccugacagaga

SEQ ID NO: 12522 - RNA, 19 nt, Artificial Sequence
  Synthetic
agacaaggccaguguauau

SEQ ID NO: 12523 - RNA, 19 nt, Artificial Sequence
  Synthetic
ggaggaaggugguuaugaa

SEQ ID NO: 12524 - RNA, 19 nt, Artificial Sequence
  Synthetic
guggacaacuucagguuua

SEQ ID NO: 12525 - RNA, 19 nt, Artificial Sequence
  Synthetic
agaugugacuguugaguau

SEQ ID NO: 12526 - RNA, 19 nt, Artificial Sequence
  Synthetic
ccacacaguuuggaagaaa

SEQ ID NO: 12527 - RNA, 19 nt, Artificial Sequence
  Synthetic
cagagaagcuagaccugaa

SEQ ID NO: 12528 - RNA, 19 nt, Artificial Sequence
  Synthetic
ccacagaggaagacauuga

SEQ ID NO: 12529 - RNA, 19 nt, Artificial Sequence
  Synthetic
gcaaggaggagcugaguca

SEQ ID NO: 12530 - RNA, 19 nt, Artificial Sequence
  Synthetic
gaugagaaccacagcauau

SEQ ID NO: 12531 - RNA, 19 nt, Artificial Sequence
  Synthetic
uaaauagcauugaggaaga

SEQ ID NO: 12532 - RNA, 19 nt, Artificial Sequence
  Synthetic
gggaacagaaggagaagga

SEQ ID NO: 12533 - RNA, 19 nt, Artificial Sequence
  Synthetic
gcacauuccuggagagaga

SEQ ID NO: 12534 - RNA, 19 nt, Artificial Sequence
  Synthetic
ggcccaaacuagagugaaa

SEQ ID NO: 12535 - RNA, 19 nt, Artificial Sequence
  Synthetic
caguagaaguugacaauuu

SEQ ID NO: 12536 - RNA, 19 nt, Artificial Sequence
  Synthetic
acaaacaaaucuugaggaa

SEQ ID NO: 12537 - RNA, 19 nt, Artificial Sequence
  Synthetic
gcuaaagaaguuacagaua

SEQ ID NO: 12538 - RNA, 19 nt, Artificial Sequence
  Synthetic
ucaaagaagcucugacuaa

SEQ ID NO: 12539 - RNA, 19 nt, Artificial Sequence
  Synthetic
aggauaagacugugcauaa

SEQ ID NO: 12540 - RNA, 19 nt, Artificial Sequence
  Synthetic
gguuaugggugccaagaua

SEQ ID NO: 12541 - RNA, 19 nt, Artificial Sequence
  Synthetic
guagaaacguugagaaucu

SEQ ID NO: 12542 - RNA, 19 nt, Artificial Sequence
  Synthetic
gaacauggcuccaggaaag

SEQ ID NO: 12543 - RNA, 19 nt, Artificial Sequence
  Synthetic
ggaugaagaugauaagcuu

SEQ ID NO: 12544 - RNA, 19 nt, Artificial Sequence
  Synthetic
ugagaagcauccagagcua

SEQ ID NO: 12545 - RNA, 19 nt, Artificial Sequence
  Synthetic
ggaugaagauaauaagcuu

SEQ ID NO: 12546 - RNA, 19 nt, Artificial Sequence
  Synthetic
caacauuccugcuagcaua

SEQ ID NO: 12547 - RNA, 19 nt, Artificial Sequence
  Synthetic
ggacagaauucgcacacuu

SEQ ID NO: 12548 - RNA, 19 nt, Artificial Sequence
  Synthetic
cuacagaggaggacauuga

SEQ ID NO: 12549 - RNA, 19 nt, Artificial Sequence
  Synthetic
gggaagaagguuuggauua

SEQ ID NO: 12550 - RNA, 19 nt, Artificial Sequence
  Synthetic
ugaucuauauguugggaaa

SEQ ID NO: 12551 - RNA, 19 nt, Artificial Sequence
  Synthetic
gaucauaauaaccgaacaa

SEQ ID NO: 12552 - RNA, 19 nt, Artificial Sequence
  Synthetic
gaggagaauaagaaagaau

SEQ ID NO: 12553 - RNA, 19 nt, Artificial Sequence
  Synthetic
cgaaguguccagagaagaa

SEQ ID NO: 12554 - RNA, 19 nt, Artificial Sequence
  Synthetic
gaacaacaguccagggcca

SEQ ID NO: 12555 - RNA, 19 nt, Artificial Sequence
  Synthetic
gcagaggacuguuagaaaa

SEQ ID NO: 12556 - RNA, 19 nt, Artificial Sequence
  Synthetic
augagaagcucuacgagaa

SEQ ID NO: 12557 - RNA, 19 nt, Artificial Sequence
  Synthetic
cagaggagaauaagaaaga

SEQ ID NO: 12558 - RNA, 19 nt, Artificial Sequence
  Synthetic
cagucacagaggagaauaa

SEQ ID NO: 12559 - RNA, 19 nt, Artificial Sequence
  Synthetic
gggaaaacggauucgauaa

SEQ ID NO: 12560 - RNA, 19 nt, Artificial Sequence
  Synthetic
ucacagaggagaauaagaa

SEQ ID NO: 12561 - RNA, 19 nt, Artificial Sequence
  Synthetic
cggaacugcccgaaggcua

SEQ ID NO: 12562 - RNA, 19 nt, Artificial Sequence
  Synthetic
guuuacagacccaagguua

SEQ ID NO: 12563 - RNA, 19 nt, Artificial Sequence
  Synthetic
agaaggaacuggagcugau

SEQ ID NO: 12564 - RNA, 19 nt, Artificial Sequence
  Synthetic
gauuaaaagauaccggaua

SEQ ID NO: 12565 - RNA, 19 nt, Artificial Sequence
  Synthetic
gaugaagaaaggagggcca

SEQ ID NO: 12566 - RNA, 19 nt, Artificial Sequence
  Synthetic
ggaggagaccugcggguuu

SEQ ID NO: 12567 - RNA, 19 nt, Artificial Sequence
  Synthetic
augaaaugcugaauccuua

SEQ ID NO: 12568 - RNA, 19 nt, Artificial Sequence
  Synthetic
gcaucgaaguguccagaga

SEQ ID NO: 12569 - RNA, 19 nt, Artificial Sequence
  Synthetic
gcccgaaggcuacgaacaa

SEQ ID NO: 12570 - RNA, 19 nt, Artificial Sequence
  Synthetic
ccagauaguggucaguuua

SEQ ID NO: 12571 - RNA, 19 nt, Artificial Sequence
  Synthetic
cgaaagagaucuaguccag

SEQ ID NO: 12572 - RNA, 19 nt, Artificial Sequence
  Synthetic
aaacuaaaccccucagaua

SEQ ID NO: 12573 - RNA, 19 nt, Artificial Sequence
  Synthetic
gccagauaguggucaguuu

SEQ ID NO: 12574 - RNA, 19 nt, Artificial Sequence
  Synthetic
guguggaaccauaagaaaa

SEQ ID NO: 12575 - RNA, 19 nt, Artificial Sequence
  Synthetic
aaagagaucuaguccagaa

SEQ ID NO: 12576 - RNA, 19 nt, Artificial Sequence
  Synthetic
aaugaagaugcgaccgaaa

SEQ ID NO: 12577 - RNA, 19 nt, Artificial Sequence
  Synthetic
ggaagaagguuuggauuac

SEQ ID NO: 12578 - RNA, 19 nt, Artificial Sequence
  Synthetic
gaaccagcacuaugaucua

SEQ ID NO: 12579 - RNA, 19 nt, Artificial Sequence
  Synthetic
guuaaugacuggaagguaa

SEQ ID NO: 12580 - RNA, 19 nt, Artificial Sequence
  Synthetic
gaaacaaggugcuggauuu

SEQ ID NO: 12581 - RNA, 19 nt, Artificial Sequence
  Synthetic
cagcagaguuucaaagaau

SEQ ID NO: 12582 - RNA, 19 nt, Artificial Sequence
  Synthetic
gauaaaauuucguggagaa

SEQ ID NO: 12583 - RNA, 19 nt, Artificial Sequence
  Synthetic
ccacuuuguuggacgaaua

SEQ ID NO: 12584 - RNA, 19 nt, Artificial Sequence
  Synthetic
ugaagaaacauguggauuu

SEQ ID NO: 12585 - RNA, 19 nt, Artificial Sequence
  Synthetic
agaaauuacaugagcagaa

SEQ ID NO: 12586 - RNA, 19 nt, Artificial Sequence
  Synthetic
gcuaacagccauugaagaa

SEQ ID NO: 12587 - RNA, 19 nt, Artificial Sequence
  Synthetic
gcucauuauuuguggacuu

SEQ ID NO: 12588 - RNA, 19 nt, Artificial Sequence
  Synthetic
gaccauaacaacagaacaa

SEQ ID NO: 12589 - RNA, 19 nt, Artificial Sequence
  Synthetic
caagaagauccauaagaaa

SEQ ID NO: 12590 - RNA, 19 nt, Artificial Sequence
  Synthetic
ccucaaagacacugguuau

SEQ ID NO: 12591 - RNA, 19 nt, Artificial Sequence
  Synthetic
acuuaaaccaaauggcaaa

SEQ ID NO: 12592 - RNA, 19 nt, Artificial Sequence
  Synthetic
ccgaauaggcacaggagga

SEQ ID NO: 12593 - RNA, 19 nt, Artificial Sequence
  Synthetic
gcagaaaggauuuaaugaa

SEQ ID NO: 12594 - RNA, 19 nt, Artificial Sequence
  Synthetic
ugacaagcuucaaggauuu

SEQ ID NO: 12595 - RNA, 19 nt, Artificial Sequence
  Synthetic
acaagaagauccauaagaa

SEQ ID NO: 12596 - RNA, 19 nt, Artificial Sequence
  Synthetic
agaagaaggccuugacuau

SEQ ID NO: 12597 - RNA, 19 nt, Artificial Sequence
  Synthetic
caacagaacaacacaauuu

SEQ ID NO: 12598 - RNA, 19 nt, Artificial Sequence
  Synthetic
ggaagcgauuaaugauaaa

SEQ ID NO: 12599 - RNA, 19 nt, Artificial Sequence
  Synthetic
ggucacaacgacauagaaa

SEQ ID NO: 12600 - RNA, 19 nt, Artificial Sequence
  Synthetic
caucaauugugaagagcuu

SEQ ID NO: 12601 - RNA, 19 nt, Artificial Sequence
  Synthetic
ggcuaugaacagaggacaa

SEQ ID NO: 12602 - RNA, 19 nt, Artificial Sequence
  Synthetic
ggaagaauccaguaucuaa

SEQ ID NO: 12603 - RNA, 19 nt, Artificial Sequence
  Synthetic
gagaagaaggccuugacua

SEQ ID NO: 12604 - RNA, 19 nt, Artificial Sequence
  Synthetic
gguugauggaucugggcaa

SEQ ID NO: 12605 - RNA, 19 nt, Artificial Sequence
  Synthetic
cgacauagaaauuacauga

SEQ ID NO: 12606 - RNA, 19 nt, Artificial Sequence
  Synthetic
caaaguggaaucagcauua

SEQ ID NO: 12607 - RNA, 19 nt, Artificial Sequence
  Synthetic
ucacaacgacauagaaauu

SEQ ID NO: 12608 - RNA, 19 nt, Artificial Sequence
  Synthetic
gaugaagagcgacgagcaa

SEQ ID NO: 12609 - RNA, 19 nt, Artificial Sequence
  Synthetic
guaggaugguagcacacaa

SEQ ID NO: 12610 - RNA, 19 nt, Artificial Sequence
  Synthetic
uguuauuacuugccuggaa

SEQ ID NO: 12611 - RNA, 19 nt, Artificial Sequence
  Synthetic
gggagggucucuggcuuua

SEQ ID NO: 12612 - RNA, 19 nt, Artificial Sequence
  Synthetic
uguagcagcuuaacuguau

SEQ ID NO: 12613 - RNA, 19 nt, Artificial Sequence
  Synthetic
ccuccuaccucuucauguu

SEQ ID NO: 12614 - RNA, 19 nt, Artificial Sequence
  Synthetic
cgccgugcacgcagcauua

SEQ ID NO: 12615 - RNA, 19 nt, Artificial Sequence
  Synthetic
ccagguggcagccgacaau

SEQ ID NO: 12616 - RNA, 19 nt, Artificial Sequence
  Synthetic
ccagaaccuuccuccucuu

SEQ ID NO: 12617 - RNA, 19 nt, Artificial Sequence
  Synthetic
gacacgcacuuccgcacau

SEQ ID NO: 12618 - RNA, 19 nt, Artificial Sequence
  Synthetic
gagcauccgcgugcacuuu

SEQ ID NO: 12619 - RNA, 19 nt, Artificial Sequence
  Synthetic
gagggucucuggcuuuauu

SEQ ID NO: 12620 - RNA, 19 nt, Artificial Sequence
  Synthetic
gcgacuaccugagcuccuu

SEQ ID NO: 12621 - RNA, 19 nt, Artificial Sequence
  Synthetic
gcauccgcgugcacuuuca

SEQ ID NO: 12622 - RNA, 19 nt, Artificial Sequence
  Synthetic
uccuaccucuucauguuua

SEQ ID NO: 12623 - RNA, 19 nt, Artificial Sequence
  Synthetic
gguggcagccgacaaugca

SEQ ID NO: 12624 - RNA, 19 nt, Artificial Sequence
  Synthetic
gggaugccguguuauuuug

SEQ ID NO: 12625 - RNA, 19 nt, Artificial Sequence
  Synthetic
gaaccuuccuccucuuccu

SEQ ID NO: 12626 - RNA, 19 nt, Artificial Sequence
  Synthetic
uccguucgcacgccgauua

SEQ ID NO: 12627 - RNA, 19 nt, Artificial Sequence
  Synthetic
acacgcacuuccgcacauu

SEQ ID NO: 12628 - RNA, 19 nt, Artificial Sequence
  Synthetic
gcugugcagaauccuauuu

SEQ ID NO: 12629 - RNA, 19 nt, Artificial Sequence
  Synthetic
ccugaacucgcaccuccua

SEQ ID NO: 12630 - RNA, 19 nt, Artificial Sequence
  Synthetic
gagcuucgacugccucuuc

SEQ ID NO: 12631 - RNA, 19 nt, Artificial Sequence
  Synthetic
ggacgccugcggauucuac

SEQ ID NO: 12632 - RNA, 19 nt, Artificial Sequence
  Synthetic
ggaaauggcuuuagaaaua

SEQ ID NO: 12633 - RNA, 19 nt, Artificial Sequence
  Synthetic
guucagaugugcaaggaua

SEQ ID NO: 12634 - RNA, 19 nt, Artificial Sequence
  Synthetic
uaaugaagccaaagagaaa

SEQ ID NO: 12635 - RNA, 19 nt, Artificial Sequence
  Synthetic
ucgaauaccaagacggaaa

SEQ ID NO: 12636 - RNA, 19 nt, Artificial Sequence
  Synthetic
cuggauaacuauauggaau

SEQ ID NO: 12637 - RNA, 19 nt, Artificial Sequence
  Synthetic
cauucuacccuuugaaaua

SEQ ID NO: 12638 - RNA, 19 nt, Artificial Sequence
  Synthetic
cagacaaggagaugaguuu

SEQ ID NO: 12639 - RNA, 19 nt, Artificial Sequence
  Synthetic
ggagaugaguuuccacuaa

SEQ ID NO: 12640 - RNA, 19 nt, Artificial Sequence
  Synthetic
gaaggaacuuucuugauua

SEQ ID NO: 12641 - RNA, 19 nt, Artificial Sequence
  Synthetic
ggguagaggugccgagauc

SEQ ID NO: 12642 - RNA, 19 nt, Artificial Sequence
  Synthetic
ucauaggaauacugaagaa

SEQ ID NO: 12643 - RNA, 19 nt, Artificial Sequence
  Synthetic
gugucaaauccaagcuuaa

SEQ ID NO: 12644 - RNA, 19 nt, Artificial Sequence
  Synthetic
cugaagaagugggaaggaa

SEQ ID NO: 12645 - RNA, 19 nt, Artificial Sequence
  Synthetic
gcuaaagacaagaauauca

SEQ ID NO: 12646 - RNA, 19 nt, Artificial Sequence
  Synthetic
gagcagugaugcaauagaa

SEQ ID NO: 12647 - RNA, 19 nt, Artificial Sequence
  Synthetic
gcagugaugcaauagaaua

SEQ ID NO: 12648 - RNA, 19 nt, Artificial Sequence
  Synthetic
agacaagaauaucaugcua

SEQ ID NO: 12649 - RNA, 19 nt, Artificial Sequence
  Synthetic
guaccuaggaguuuuguua

SEQ ID NO: 12650 - RNA, 19 nt, Artificial Sequence
  Synthetic
gcuuaaacaauuugacagu

SEQ ID NO: 12651 - RNA, 19 nt, Artificial Sequence
  Synthetic
guuuaaaguuccuccagau

SEQ ID NO: 12652 - RNA, 19 nt, Artificial Sequence
  Synthetic
ccaacaagacuaaaagauu

SEQ ID NO: 12653 - RNA, 19 nt, Artificial Sequence
  Synthetic
cuauacaggugcaacucaa

SEQ ID NO: 12654 - RNA, 19 nt, Artificial Sequence
  Synthetic
gauuagagauagcucgcau

SEQ ID NO: 12655 - RNA, 19 nt, Artificial Sequence
  Synthetic
uuaacagcuugaagaggua

SEQ ID NO: 12656 - RNA, 19 nt, Artificial Sequence
  Synthetic
uuaaugaagccaaagagaa

SEQ ID NO: 12657 - RNA, 19 nt, Artificial Sequence
  Synthetic
guuaaugaagccaaagaga

SEQ ID NO: 12658 - RNA, 19 nt, Artificial Sequence
  Synthetic
gggaaguaugacuguuaau

SEQ ID NO: 12659 - RNA, 19 nt, Artificial Sequence
  Synthetic
cagacuaccuacuaacaau

SEQ ID NO: 12660 - RNA, 19 nt, Artificial Sequence
  Synthetic
cagcaucucuguaggcuca

SEQ ID NO: 12661 - RNA, 19 nt, Artificial Sequence
  Synthetic
gguccaggcuccaguagga

SEQ ID NO: 12662 - RNA, 19 nt, Artificial Sequence
  Synthetic
ggaccaagaaccugcgcau

SEQ ID NO: 12663 - RNA, 19 nt, Artificial Sequence
  Synthetic
cagcaucucugucggaaga

SEQ ID NO: 12664 - RNA, 19 nt, Artificial Sequence
  Synthetic
ccagaagagccuauuacau

SEQ ID NO: 12665 - RNA, 19 nt, Artificial Sequence
  Synthetic
ccuggacuccuaugagaaa

SEQ ID NO: 12666 - RNA, 19 nt, Artificial Sequence
  Synthetic
cagaagagccuauuacauc

SEQ ID NO: 12667 - RNA, 19 nt, Artificial Sequence
  Synthetic
agaagagccuauuacaucu

SEQ ID NO: 12668 - RNA, 19 nt, Artificial Sequence
  Synthetic
gaagagccuauuacaucua

SEQ ID NO: 12669 - RNA, 19 nt, Artificial Sequence
  Synthetic
ggucacccacagcaaguuu

SEQ ID NO: 12670 - RNA, 19 nt, Artificial Sequence
  Synthetic
caccuggacuccuaugaga

SEQ ID NO: 12671 - RNA, 19 nt, Artificial Sequence
  Synthetic
ccaagaaccugcgcaucca

SEQ ID NO: 12672 - RNA, 19 nt, Artificial Sequence
  Synthetic
gaccagcgccacuucuuca

SEQ ID NO: 12673 - RNA, 19 nt, Artificial Sequence
  Synthetic
gcaggagagcggcuucuac

SEQ ID NO: 12674 - RNA, 19 nt, Artificial Sequence
  Synthetic
ggaccagcgccacuucuuc

SEQ ID NO: 12675 - RNA, 19 nt, Artificial Sequence
  Synthetic
caacguggccacucuucag

SEQ ID NO: 12676 - RNA, 19 nt, Artificial Sequence
  Synthetic
ucaagaccuucagcuccaa

SEQ ID NO: 12677 - RNA, 19 nt, Artificial Sequence
  Synthetic
agugaaugguauagagaaa

SEQ ID NO: 12678 - RNA, 19 nt, Artificial Sequence
  Synthetic
ggaauaagaacaagagauu

SEQ ID NO: 12679 - RNA, 19 nt, Artificial Sequence
  Synthetic
ggauaauauuccagauaga

SEQ ID NO: 12680 - RNA, 19 nt, Artificial Sequence
  Synthetic
ucaucaaugugcagaauaa

SEQ ID NO: 12681 - RNA, 19 nt, Artificial Sequence
  Synthetic
ggauaaauacgcagccgaa

SEQ ID NO: 12682 - RNA, 19 nt, Artificial Sequence
  Synthetic
gagaagcacuacugaaaga

SEQ ID NO: 12683 - RNA, 19 nt, Artificial Sequence
  Synthetic
aggagaagcacuacugaaa

SEQ ID NO: 12684 - RNA, 19 nt, Artificial Sequence
  Synthetic
uaaacauaccugugugaua

SEQ ID NO: 12685 - RNA, 19 nt, Artificial Sequence
  Synthetic
gcacucaaaugguagguuu

SEQ ID NO: 12686 - RNA, 19 nt, Artificial Sequence
  Synthetic
ccgaagugucuuuaaggaa

SEQ ID NO: 12687 - RNA, 19 nt, Artificial Sequence
  Synthetic
uaucaacggugaagaugaa

SEQ ID NO: 12688 - RNA, 19 nt, Artificial Sequence
  Synthetic
acauauacacugaagauga

SEQ ID NO: 12689 - RNA, 19 nt, Artificial Sequence
  Synthetic
aaacauaccugugugauaa

SEQ ID NO: 12690 - RNA, 19 nt, Artificial Sequence
  Synthetic
gcagaagggaagcuagcaa

SEQ ID NO: 12691 - RNA, 19 nt, Artificial Sequence
  Synthetic
uuucuaagguugugcuaau

SEQ ID NO: 12692 - RNA, 19 nt, Artificial Sequence
  Synthetic
cuuaaaaccuuacggaaau

SEQ ID NO: 12693 - RNA, 19 nt, Artificial Sequence
  Synthetic
gcagaauaaucaaauccaa

SEQ ID NO: 12694 - RNA, 19 nt, Artificial Sequence
  Synthetic
guaaaagagucaucaguuu

SEQ ID NO: 12695 - RNA, 19 nt, Artificial Sequence
  Synthetic
caaaucagaugaaugggua

SEQ ID NO: 12696 - RNA, 19 nt, Artificial Sequence
  Synthetic
cagaagggaagcuagcaaa

SEQ ID NO: 12697 - RNA, 19 nt, Artificial Sequence
  Synthetic
caaaagacaguguugaaua

SEQ ID NO: 12698 - RNA, 19 nt, Artificial Sequence
  Synthetic
cgauaucaacggugaagau

SEQ ID NO: 12699 - RNA, 19 nt, Artificial Sequence
  Synthetic
guauucaacccuaaguaaa

SEQ ID NO: 12700 - RNA, 19 nt, Artificial Sequence
  Synthetic
gguacaaauuggcauaaca

SEQ ID NO: 12701 - RNA, 19 nt, Artificial Sequence
  Synthetic
aaucaaauccaaaggaacu

SEQ ID NO: 12702 - RNA, 19 nt, Artificial Sequence
  Synthetic
acaaauuggcauaacauga

SEQ ID NO: 12703 - RNA, 19 nt, Artificial Sequence
  Synthetic
gauuagguaacuagucaua

SEQ ID NO: 12704 - RNA, 19 nt, Artificial Sequence
  Synthetic
uaauuaaacucggguacaa

SEQ ID NO: 12705 - RNA, 19 nt, Artificial Sequence
  Synthetic
aaagggaagucuugagguu

SEQ ID NO: 12706 - RNA, 19 nt, Artificial Sequence
  Synthetic
gaaaauggcuccaaagguu

SEQ ID NO: 12707 - RNA, 19 nt, Artificial Sequence
  Synthetic
gaagauaggcuuagagaga

SEQ ID NO: 12708 - RNA, 19 nt, Artificial Sequence
  Synthetic
agacagagguugcaggaua

SEQ ID NO: 12709 - RNA, 19 nt, Artificial Sequence
  Synthetic
ggaggaagccguagugaaa

SEQ ID NO: 12710 - RNA, 19 nt, Artificial Sequence
  Synthetic
gcuucaaauuacagggaau

SEQ ID NO: 12711 - RNA, 19 nt, Artificial Sequence
  Synthetic
cagcagaacuguaggaagu

SEQ ID NO: 12712 - RNA, 19 nt, Artificial Sequence
  Synthetic
gggcauuuguuaugaagaa

SEQ ID NO: 12713 - RNA, 19 nt, Artificial Sequence
  Synthetic
ccucaauguuacaggauuu

SEQ ID NO: 12714 - RNA, 19 nt, Artificial Sequence
  Synthetic
ggauagagcuacagguguu

SEQ ID NO: 12715 - RNA, 19 nt, Artificial Sequence
  Synthetic
cuacagaagaugaagaaga

SEQ ID NO: 12716 - RNA, 19 nt, Artificial Sequence
  Synthetic
agauaggcuuagagagaga

SEQ ID NO: 12717 - RNA, 19 nt, Artificial Sequence
  Synthetic
uuacaaagcuaguaguaga

SEQ ID NO: 12718 - RNA, 19 nt, Artificial Sequence
  Synthetic
gaaacuauccaaugacaua

SEQ ID NO: 12719 - RNA, 19 nt, Artificial Sequence
  Synthetic
gagaaccagucaaggcaaa

SEQ ID NO: 12720 - RNA, 19 nt, Artificial Sequence
  Synthetic
cagaauaagcuaacucuaa

SEQ ID NO: 12721 - RNA, 19 nt, Artificial Sequence
  Synthetic
ggauuaagcccuucgaaga

SEQ ID NO: 12722 - RNA, 19 nt, Artificial Sequence
  Synthetic
gcaacaaagcagucccuua

SEQ ID NO: 12723 - RNA, 19 nt, Artificial Sequence
  Synthetic
caacaaagcagucccuuaa

SEQ ID NO: 12724 - RNA, 19 nt, Artificial Sequence
  Synthetic
cuacaaagacccagaguuc

SEQ ID NO: 12725 - RNA, 19 nt, Artificial Sequence
  Synthetic
gcaccuaagucuauauuca

SEQ ID NO: 12726 - RNA, 19 nt, Artificial Sequence
  Synthetic
gcuguuacuuauucagaua

SEQ ID NO: 12727 - RNA, 19 nt, Artificial Sequence
  Synthetic
gggaggaagccguagugaa

SEQ ID NO: 12728 - RNA, 19 nt, Artificial Sequence
  Synthetic
gaugaagaagauaggcuua

SEQ ID NO: 12729 - RNA, 19 nt, Artificial Sequence
  Synthetic
gcagaagcagcgucagaua

SEQ ID NO: 12730 - RNA, 19 nt, Artificial Sequence
  Synthetic
ugagcaagauuguguuuua

SEQ ID NO: 12731 - RNA, 19 nt, Artificial Sequence
  Synthetic
ggacuucaaaggagagaga

SEQ ID NO: 12732 - RNA, 19 nt, Artificial Sequence
  Synthetic
ggugagugcuccauaguuu

SEQ ID NO: 12733 - RNA, 19 nt, Artificial Sequence
  Synthetic
agagagagaaggcggcuua

SEQ ID NO: 12734 - RNA, 19 nt, Artificial Sequence
  Synthetic
gcggcuuaguauugaagaa

SEQ ID NO: 12735 - RNA, 19 nt, Artificial Sequence
  Synthetic
gauuaagcccuucgaagaa

SEQ ID NO: 12736 - RNA, 19 nt, Artificial Sequence
  Synthetic
gcucagggacucugcgcaa

SEQ ID NO: 12737 - RNA, 19 nt, Artificial Sequence
  Synthetic
ucuuaaaaccuuacggaaa

SEQ ID NO: 12738 - RNA, 19 nt, Artificial Sequence
  Synthetic
cugcaaaacagaagucaaa

SEQ ID NO: 12739 - RNA, 19 nt, Artificial Sequence
  Synthetic
agccagauguggaaggaca

SEQ ID NO: 12740 - RNA, 19 nt, Artificial Sequence
  Synthetic
guugggaggcagaagggaa

SEQ ID NO: 12741 - RNA, 19 nt, Artificial Sequence
  Synthetic
gcagaagugccgacagaaa

SEQ ID NO: 12742 - RNA, 19 nt, Artificial Sequence
  Synthetic
gguuauguguggaguggaa

SEQ ID NO: 12743 - RNA, 19 nt, Artificial Sequence
  Synthetic
agucaaacuugguguauuu

SEQ ID NO: 12744 - RNA, 19 nt, Artificial Sequence
  Synthetic
aagcacuacuggaaggaaa

SEQ ID NO: 12745 - RNA, 19 nt, Artificial Sequence
  Synthetic
gagcagaagugccgacaga

SEQ ID NO: 12746 - RNA, 19 nt, Artificial Sequence
  Synthetic
ccacaaauuuccacuggua

SEQ ID NO: 12747 - RNA, 19 nt, Artificial Sequence
  Synthetic
cgaagaaauauggaagaaa

SEQ ID NO: 12748 - RNA, 19 nt, Artificial Sequence
  Synthetic
cagcuaaaacgaagaaaua

SEQ ID NO: 12749 - RNA, 19 nt, Artificial Sequence
  Synthetic
guagaugacaaaugguuaa

SEQ ID NO: 12750 - RNA, 19 nt, Artificial Sequence
  Synthetic
guuauacacucgagcuuaa

SEQ ID NO: 12751 - RNA, 19 nt, Artificial Sequence
  Synthetic
gguagaugacaaaugguua

SEQ ID NO: 12752 - RNA, 19 nt, Artificial Sequence
  Synthetic
ggggagugauggauaaaua

SEQ ID NO: 12753 - RNA, 19 nt, Artificial Sequence
  Synthetic
gaagauagugauauggauu

SEQ ID NO: 12754 - RNA, 19 nt, Artificial Sequence
  Synthetic
acgaagaaauauggaagaa

SEQ ID NO: 12755 - RNA, 19 nt, Artificial Sequence
  Synthetic
cauauaugcagaacaguua

SEQ ID NO: 12756 - RNA, 19 nt, Artificial Sequence
  Synthetic
gcagaacaguuauuuguaa

SEQ ID NO: 12757 - RNA, 19 nt, Artificial Sequence
  Synthetic
gggaacaugggaaugauaa

SEQ ID NO: 12758 - RNA, 19 nt, Artificial Sequence
  Synthetic
caguaaagcugaauguugu

SEQ ID NO: 12759 - RNA, 19 nt, Artificial Sequence
  Synthetic
gugaacucauguuagauaa

SEQ ID NO: 12760 - RNA, 19 nt, Artificial Sequence
  Synthetic
ugauuaaucuggucaauga

SEQ ID NO: 12761 - RNA, 19 nt, Artificial Sequence
  Synthetic
cuacaugacuuacaccaua

SEQ ID NO: 12762 - RNA, 19 nt, Artificial Sequence
  Synthetic
caaugagaaucaaauggaa

SEQ ID NO: 12763 - RNA, 19 nt, Artificial Sequence
  Synthetic
cguguagguuguauacuua

SEQ ID NO: 12764 - RNA, 19 nt, Artificial Sequence
  Synthetic
gacaaaugguuaaugacuu

SEQ ID NO: 12765 - RNA, 19 nt, Artificial Sequence
  Synthetic
gaugacaaaugguuaauga

SEQ ID NO: 12766 - RNA, 19 nt, Artificial Sequence
  Synthetic
gagcuaaaccaucuucaaa

SEQ ID NO: 12767 - RNA, 19 nt, Artificial Sequence
  Synthetic
ccacaaauuccuugaaaua

SEQ ID NO: 12768 - RNA, 19 nt, Artificial Sequence
  Synthetic
ucacagaucuagugcuaaa

SEQ ID NO: 12769 - RNA, 19 nt, Artificial Sequence
  Synthetic
ggugaauguuccugaaauu

SEQ ID NO: 12770 - RNA, 19 nt, Artificial Sequence
  Synthetic
ccaacaaugacgauaauaa

SEQ ID NO: 12771 - RNA, 19 nt, Artificial Sequence
  Synthetic
gagcgaagcuguuugagua

SEQ ID NO: 12772 - RNA, 19 nt, Artificial Sequence
  Synthetic
gugaagaagacuuaaagaa

SEQ ID NO: 12773 - RNA, 19 nt, Artificial Sequence
  Synthetic
gauaaauccacuaguacaa

SEQ ID NO: 12774 - RNA, 19 nt, Artificial Sequence
  Synthetic
ggagagaaaucuauacuuu

SEQ ID NO: 12775 - RNA, 19 nt, Artificial Sequence
  Synthetic
gaacuuucgucaugaggaa

SEQ ID NO: 12776 - RNA, 19 nt, Artificial Sequence
  Synthetic
gauaauaaugcccagaaua

SEQ ID NO: 12777 - RNA, 19 nt, Artificial Sequence
  Synthetic
gcagauaaauccacuagua

SEQ ID NO: 12778 - RNA, 19 nt, Artificial Sequence
  Synthetic
ggaugaaagcagucaauga

SEQ ID NO: 12779 - RNA, 19 nt, Artificial Sequence
  Synthetic
agagagugaugaugaagaa

SEQ ID NO: 12780 - RNA, 19 nt, Artificial Sequence
  Synthetic
aaucacagaucuagugcua

SEQ ID NO: 12781 - RNA, 19 nt, Artificial Sequence
  Synthetic
ggaaauuucguaaucguaa

SEQ ID NO: 12782 - RNA, 19 nt, Artificial Sequence
  Synthetic
aggccaaacuggagaaaua

SEQ ID NO: 12783 - RNA, 19 nt, Artificial Sequence
  Synthetic
gagagauccugaagacuua

SEQ ID NO: 12784 - RNA, 19 nt, Artificial Sequence
  Synthetic
gggaaaagcugaagauguu

SEQ ID NO: 12785 - RNA, 19 nt, Artificial Sequence
  Synthetic
gaaacaagguugacaaacu

SEQ ID NO: 12786 - RNA, 19 nt, Artificial Sequence
  Synthetic
aagcagaggcccagucaaa

SEQ ID NO: 12787 - RNA, 19 nt, Artificial Sequence
  Synthetic
ggauauucaggaaguguua

SEQ ID NO: 12788 - RNA, 19 nt, Artificial Sequence
  Synthetic
gguggaagccauuguggaa

SEQ ID NO: 12789 - RNA, 19 nt, Artificial Sequence
  Synthetic
gcagaaaggagcuucaaau

SEQ ID NO: 12790 - RNA, 19 nt, Artificial Sequence
  Synthetic
cagugaggaugaugaagua

SEQ ID NO: 12791 - RNA, 19 nt, Artificial Sequence
  Synthetic
acaaagcugcugaagguaa

SEQ ID NO: 12792 - RNA, 19 nt, Artificial Sequence
  Synthetic
gcugaagucugucaugaaa

SEQ ID NO: 12793 - RNA, 19 nt, Artificial Sequence
  Synthetic
guucauguauguaggaguu

SEQ ID NO: 12794 - RNA, 19 nt, Artificial Sequence
  Synthetic
gcaggcaagccguggauuu

SEQ ID NO: 12795 - RNA, 19 nt, Artificial Sequence
  Synthetic
uuacaaagcugcugaaggu

SEQ ID NO: 12796 - RNA, 19 nt, Artificial Sequence
  Synthetic
ggguaaggaucaggacuuu

SEQ ID NO: 12797 - RNA, 19 nt, Artificial Sequence
  Synthetic
uggaagccauuguggaaga

SEQ ID NO: 12798 - RNA, 19 nt, Artificial Sequence
  Synthetic
gagcauaccuggaaaugaa

SEQ ID NO: 12799 - RNA, 19 nt, Artificial Sequence
  Synthetic
gugaacaaccuuaaagaaa

SEQ ID NO: 12800 - RNA, 19 nt, Artificial Sequence
  Synthetic
ggaaauugcaauaaagaga

SEQ ID NO: 12801 - RNA, 19 nt, Artificial Sequence
  Synthetic
cuggaaaugaagagagauu

SEQ ID NO: 12802 - RNA, 19 nt, Artificial Sequence
  Synthetic
ggaaguggaaauugcaaua

SEQ ID NO: 12803 - RNA, 19 nt, Artificial Sequence
  Synthetic
agguagaugugacaggaaa

SEQ ID NO: 12804 - RNA, 19 nt, Artificial Sequence
  Synthetic
uagccaacauggugaacaa

SEQ ID NO: 12805 - RNA, 19 nt, Artificial Sequence
  Synthetic
aagaagaugcugaggacau

SEQ ID NO: 12806 - RNA, 19 nt, Artificial Sequence
  Synthetic
agaaguuggaaguggaaau

SEQ ID NO: 12807 - RNA, 19 nt, Artificial Sequence
  Synthetic
gcacaggaguaccaggaga

SEQ ID NO: 12808 - RNA, 19 nt, Artificial Sequence
  Synthetic
aagaguggcuucuggacaa

SEQ ID NO: 12809 - RNA, 19 nt, Artificial Sequence
  Synthetic
uggagaaggaugagaggga

SEQ ID NO: 12810 - RNA, 19 nt, Artificial Sequence
  Synthetic
guggaaacacagaaaucua

SEQ ID NO: 12811 - RNA, 19 nt, Artificial Sequence
  Synthetic
ggugagaucucuauuauau

SEQ ID NO: 12812 - RNA, 19 nt, Artificial Sequence
  Synthetic
acgcagaguuugugcagca

SEQ ID NO: 12813 - RNA, 19 nt, Artificial Sequence
  Synthetic
agagggagcagcugagaau

SEQ ID NO: 12814 - RNA, 19 nt, Artificial Sequence
  Synthetic
ggauauuaccucuccagaa

SEQ ID NO: 12815 - RNA, 19 nt, Artificial Sequence
  Synthetic
ggugauaauuguccuggaa

SEQ ID NO: 12816 - RNA, 19 nt, Artificial Sequence
  Synthetic
gaacaaccuuaaagaaauc

SEQ ID NO: 12817 - RNA, 19 nt, Artificial Sequence
  Synthetic
acugaauauuggaucacaa

SEQ ID NO: 12818 - RNA, 19 nt, Artificial Sequence
  Synthetic
agagcagacuggaagaaaa

SEQ ID NO: 12819 - RNA, 19 nt, Artificial Sequence
  Synthetic
gcaaaagggcuuccuaaaa

SEQ ID NO: 12820 - RNA, 19 nt, Artificial Sequence
  Synthetic
ggaagaaaacaguggaaac

SEQ ID NO: 12821 - RNA, 19 nt, Artificial Sequence
  Synthetic
gggcugaagaagaugcuga

SEQ ID NO: 12822 - RNA, 19 nt, Artificial Sequence
  Synthetic
gugccagggcugaagaaga

SEQ ID NO: 12823 - RNA, 19 nt, Artificial Sequence
  Synthetic
aggaguuggcugagaaguu

SEQ ID NO: 12824 - RNA, 19 nt, Artificial Sequence
  Synthetic
gcguugaguugcccuguaa

SEQ ID NO: 12825 - RNA, 19 nt, Artificial Sequence
  Synthetic
ucguggagccugugagcau

SEQ ID NO: 12826 - RNA, 19 nt, Artificial Sequence
  Synthetic
cugagaaguuggaagugga

SEQ ID NO: 12827 - RNA, 19 nt, Artificial Sequence
  Synthetic
ggugaacaaccuuaaagaa

SEQ ID NO: 12828 - RNA, 19 nt, Artificial Sequence
  Synthetic
agaauaaacuccuacgaaa

SEQ ID NO: 12829 - RNA, 19 nt, Artificial Sequence
  Synthetic
gguugauaauagucaguaa

SEQ ID NO: 12830 - RNA, 19 nt, Artificial Sequence
  Synthetic
gccaagacugggugagaaa

SEQ ID NO: 12831 - RNA, 19 nt, Artificial Sequence
  Synthetic
gauaauagucaguaaccua

SEQ ID NO: 12832 - RNA, 19 nt, Artificial Sequence
  Synthetic
ggaucaagacuguggacau

SEQ ID NO: 12833 - RNA, 19 nt, Artificial Sequence
  Synthetic
ccacgagauugaugaguuu

SEQ ID NO: 12834 - RNA, 19 nt, Artificial Sequence
  Synthetic
uggaagggcugcagcaauu

SEQ ID NO: 12835 - RNA, 19 nt, Artificial Sequence
  Synthetic
ucuuugagcuugaaguuaa

SEQ ID NO: 12836 - RNA, 19 nt, Artificial Sequence
  Synthetic
ggacaaggaccgauuccaa

SEQ ID NO: 12837 - RNA, 19 nt, Artificial Sequence
  Synthetic
agaacugucugcaggcaaa

SEQ ID NO: 12838 - RNA, 19 nt, Artificial Sequence
  Synthetic
gaaauagccucacgugcaa

SEQ ID NO: 12839 - RNA, 19 nt, Artificial Sequence
  Synthetic
gagacgagaccacgagauu

SEQ ID NO: 12840 - RNA, 19 nt, Artificial Sequence
  Synthetic
guucauuucugcacaggua

SEQ ID NO: 12841 - RNA, 19 nt, Artificial Sequence
  Synthetic
gcaagaaccagccaagcaa

SEQ ID NO: 12842 - RNA, 19 nt, Artificial Sequence
  Synthetic
gaauaaacuccuacgaaag

SEQ ID NO: 12843 - RNA, 19 nt, Artificial Sequence
  Synthetic
ggacauggacgacgggacu

SEQ ID NO: 12844 - RNA, 19 nt, Artificial Sequence
  Synthetic
gagaauaaacuccuacgaa

SEQ ID NO: 12845 - RNA, 19 nt, Artificial Sequence
  Synthetic
acacaacccucguggggaa

SEQ ID NO: 12846 - RNA, 19 nt, Artificial Sequence
  Synthetic
cugcauucauggaacaaca

SEQ ID NO: 12847 - RNA, 19 nt, Artificial Sequence
  Synthetic
gcuucauuguggauggaca

SEQ ID NO: 12848 - RNA, 19 nt, Artificial Sequence
  Synthetic
ucacgugggccaugagaca

SEQ ID NO: 12849 - RNA, 19 nt, Artificial Sequence
  Synthetic
gcucaaugucuuugugaag

SEQ ID NO: 12850 - RNA, 19 nt, Artificial Sequence
  Synthetic
gaaggucacuggagggauc

SEQ ID NO: 12851 - RNA, 19 nt, Artificial Sequence
  Synthetic
cggcuucccucaaggccua

SEQ ID NO: 12852 - RNA, 19 nt, Artificial Sequence
  Synthetic
gcacagguacaauagauga

SEQ ID NO: 12853 - RNA, 19 nt, Artificial Sequence
  Synthetic
gacgagaccacgagauuga

SEQ ID NO: 12854 - RNA, 19 nt, Artificial Sequence
  Synthetic
ggcucuaccacgauggcaa

SEQ ID NO: 12855 - RNA, 19 nt, Artificial Sequence
  Synthetic
cugcacagguacaauagau

SEQ ID NO: 12856 - RNA, 19 nt, Artificial Sequence
  Synthetic
gcacaggguugcauuucuu

SEQ ID NO: 12857 - RNA, 19 nt, Artificial Sequence
  Synthetic
uggcagcccucauuaggaa

SEQ ID NO: 12858 - RNA, 19 nt, Artificial Sequence
  Synthetic
ccaccaagcugcagaacaa

SEQ ID NO: 12859 - RNA, 19 nt, Artificial Sequence
  Synthetic
gagaggaagacgaguauuu

SEQ ID NO: 12860 - RNA, 19 nt, Artificial Sequence
  Synthetic
gcggagaggaagacgagua

SEQ ID NO: 12861 - RNA, 19 nt, Artificial Sequence
  Synthetic
ccgacaugauggugggcau

SEQ ID NO: 12862 - RNA, 19 nt, Artificial Sequence
  Synthetic
auguggaccuggacaaaua

SEQ ID NO: 12863 - RNA, 19 nt, Artificial Sequence
  Synthetic
cggauguggaccuggacaa

SEQ ID NO: 12864 - RNA, 19 nt, Artificial Sequence
  Synthetic
uuaaauaagucaucagcca

SEQ ID NO: 12865 - RNA, 19 nt, Artificial Sequence
  Synthetic
cggagaggaagacgaguau

SEQ ID NO: 12866 - RNA, 19 nt, Artificial Sequence
  Synthetic
ggauguggaccuggacaaa

SEQ ID NO: 12867 - RNA, 19 nt, Artificial Sequence
  Synthetic
gggucugggaugacuuaaa

SEQ ID NO: 12868 - RNA, 19 nt, Artificial Sequence
  Synthetic
cggagcagcaugaagguca

SEQ ID NO: 12869 - RNA, 19 nt, Artificial Sequence
  Synthetic
ucaagaacaggaaguguau

SEQ ID NO: 12870 - RNA, 19 nt, Artificial Sequence
  Synthetic
cgacaagaccagcuucuca

SEQ ID NO: 12871 - RNA, 19 nt, Artificial Sequence
  Synthetic
uucaagaacaggaagugua

SEQ ID NO: 12872 - RNA, 19 nt, Artificial Sequence
  Synthetic
ucugggaugacuuaaauaa

SEQ ID NO: 12873 - RNA, 19 nt, Artificial Sequence
  Synthetic
ggucugggaugacuuaaau

SEQ ID NO: 12874 - RNA, 19 nt, Artificial Sequence
  Synthetic
acaaauaccgccacacguu

SEQ ID NO: 12875 - RNA, 19 nt, Artificial Sequence
  Synthetic
aagaacaggaaguguauag

SEQ ID NO: 12876 - RNA, 19 nt, Artificial Sequence
  Synthetic
gaacaggaaguguauaggu

SEQ ID NO: 12877 - RNA, 19 nt, Artificial Sequence
  Synthetic
ggccagggcuccaucauug

SEQ ID NO: 12878 - RNA, 19 nt, Artificial Sequence
  Synthetic
gcucuagcaggcuccacua

SEQ ID NO: 12879 - RNA, 19 nt, Artificial Sequence
  Synthetic
caagaacaggaaguguaua

SEQ ID NO: 12880 - RNA, 19 nt, Artificial Sequence
  Synthetic
cagcacuucugggagauca

SEQ ID NO: 12881 - RNA, 19 nt, Artificial Sequence
  Synthetic
cuagcaggcuccacuaacu

SEQ ID NO: 12882 - RNA, 19 nt, Artificial Sequence
  Synthetic
gacaagaccagcuucucau

SEQ ID NO: 12883 - RNA, 19 nt, Artificial Sequence
  Synthetic
ccacuucccuccaguaccu

SEQ ID NO: 12884 - RNA, 19 nt, Artificial Sequence
  Synthetic
gauguggaccuggacaaau

SEQ ID NO: 12885 - RNA, 19 nt, Artificial Sequence
  Synthetic
gcacggcacacucaccuuu

SEQ ID NO: 12886 - RNA, 19 nt, Artificial Sequence
  Synthetic
agcgaggccuccuucugua

SEQ ID NO: 12887 - RNA, 19 nt, Artificial Sequence
  Synthetic
gagcgaggccuccuucugu

SEQ ID NO: 12888 - RNA, 19 nt, Artificial Sequence
  Synthetic
gaaaauugccucugaauaa

SEQ ID NO: 12889 - RNA, 19 nt, Artificial Sequence
  Synthetic
gaauuugacugaugaauga

SEQ ID NO: 12890 - RNA, 19 nt, Artificial Sequence
  Synthetic
agacagggccagggagaaa

SEQ ID NO: 12891 - RNA, 19 nt, Artificial Sequence
  Synthetic
ggagacaccuuccggcuua

SEQ ID NO: 12892 - RNA, 19 nt, Artificial Sequence
  Synthetic
gcacagacacagacacaca

SEQ ID NO: 12893 - RNA, 19 nt, Artificial Sequence
  Synthetic
gagcguauccuuaccauua

SEQ ID NO: 12894 - RNA, 19 nt, Artificial Sequence
  Synthetic
gaagagcguuucuaauaaa

SEQ ID NO: 12895 - RNA, 19 nt, Artificial Sequence
  Synthetic
agucaguggaggugcgaga

SEQ ID NO: 12896 - RNA, 19 nt, Artificial Sequence
  Synthetic
gggccuuccuggaguguca

SEQ ID NO: 12897 - RNA, 19 nt, Artificial Sequence
  Synthetic
augaagagcguuucuaaua

SEQ ID NO: 12898 - RNA, 19 nt, Artificial Sequence
  Synthetic
gugaugugcuguuuauuua

SEQ ID NO: 12899 - RNA, 19 nt, Artificial Sequence
  Synthetic
cauuuaggcaggagacuuu

SEQ ID NO: 12900 - RNA, 19 nt, Artificial Sequence
  Synthetic
ugaagagcguuucuaauaa

SEQ ID NO: 12901 - RNA, 19 nt, Artificial Sequence
  Synthetic
ggaaaauugccucugaaua

SEQ ID NO: 12902 - RNA, 19 nt, Artificial Sequence
  Synthetic
ggacauggaugagggcaca

SEQ ID NO: 12903 - RNA, 19 nt, Artificial Sequence
  Synthetic
cagcacagacacagacaca

SEQ ID NO: 12904 - RNA, 19 nt, Artificial Sequence
  Synthetic
gaaugaagagcguuucuaa

SEQ ID NO: 12905 - RNA, 19 nt, Artificial Sequence
  Synthetic
uggaccagcuguuggacau

SEQ ID NO: 12906 - RNA, 19 nt, Artificial Sequence
  Synthetic
agggaagagcguauccuua

SEQ ID NO: 12907 - RNA, 19 nt, Artificial Sequence
  Synthetic
cagagagccuguuuccuua

SEQ ID NO: 12908 - RNA, 19 nt, Artificial Sequence
  Synthetic
ccaccguauugaucagaga

SEQ ID NO: 12909 - RNA, 19 nt, Artificial Sequence
  Synthetic
ccucuuugaacguuguuua

SEQ ID NO: 12910 - RNA, 19 nt, Artificial Sequence
  Synthetic
ugacuggaaggguggauau

SEQ ID NO: 12911 - RNA, 19 nt, Artificial Sequence
  Synthetic
caucacagcagugggauau

SEQ ID NO: 12912 - RNA, 19 nt, Artificial Sequence
  Synthetic
cuggaaauccugccaccaa

SEQ ID NO: 12913 - RNA, 19 nt, Artificial Sequence
  Synthetic
gcggagaggacaguacuua

SEQ ID NO: 12914 - RNA, 19 nt, Artificial Sequence
  Synthetic
gccucugaauaaugaauga

SEQ ID NO: 12915 - RNA, 19 nt, Artificial Sequence
  Synthetic
gagcguuucuaauaaaguu

SEQ ID NO: 12916 - RNA, 19 nt, Artificial Sequence
  Synthetic
cggcauggcugucacaaag

SEQ ID NO: 12917 - RNA, 19 nt, Artificial Sequence
  Synthetic
gcgcuugcccucucuuuua

SEQ ID NO: 12918 - RNA, 19 nt, Artificial Sequence
  Synthetic
ggaauaauccaaaggaaau

SEQ ID NO: 12919 - RNA, 19 nt, Artificial Sequence
  Synthetic
agugaaagcuuguuguaaa

SEQ ID NO: 12920 - RNA, 19 nt, Artificial Sequence
  Synthetic
gggaauagggauagacuuu

SEQ ID NO: 12921 - RNA, 19 nt, Artificial Sequence
  Synthetic
gggauagacuuuacagauu

SEQ ID NO: 12922 - RNA, 19 nt, Artificial Sequence
  Synthetic
ggaacuucuuuaaaggaaa

SEQ ID NO: 12923 - RNA, 19 nt, Artificial Sequence
  Synthetic
ggagggaauuguauugaua

SEQ ID NO: 12924 - RNA, 19 nt, Artificial Sequence
  Synthetic
agaaguaucaggaugaaua

SEQ ID NO: 12925 - RNA, 19 nt, Artificial Sequence
  Synthetic
guaagaaguaucaggauga

SEQ ID NO: 12926 - RNA, 19 nt, Artificial Sequence
  Synthetic
gaacgaugugauugauaua

SEQ ID NO: 12927 - RNA, 19 nt, Artificial Sequence
  Synthetic
cacaauaccacuuaggaaa

SEQ ID NO: 12928 - RNA, 19 nt, Artificial Sequence
  Synthetic
agaaggaaauacaaagaga

SEQ ID NO: 12929 - RNA, 19 nt, Artificial Sequence
  Synthetic
gggaacuucuuuaaaggaa

SEQ ID NO: 12930 - RNA, 19 nt, Artificial Sequence
  Synthetic
ggauagacuuuacagauuu

SEQ ID NO: 12931 - RNA, 19 nt, Artificial Sequence
  Synthetic
agaaguaguuugcugcuaa

SEQ ID NO: 12932 - RNA, 19 nt, Artificial Sequence
  Synthetic
guuaaaccauucugggauu

SEQ ID NO: 12933 - RNA, 19 nt, Artificial Sequence
  Synthetic
cauccaauaugucaaguua

SEQ ID NO: 12934 - RNA, 19 nt, Artificial Sequence
  Synthetic
gaaggaaauacaaagagaa

SEQ ID NO: 12935 - RNA, 19 nt, Artificial Sequence
  Synthetic
guaauaacaaccacaagaa

SEQ ID NO: 12936 - RNA, 19 nt, Artificial Sequence
  Synthetic
guaguuugcugcuaauaua

SEQ ID NO: 12937 - RNA, 19 nt, Artificial Sequence
  Synthetic
ccauacaucuuaaugaaca

SEQ ID NO: 12938 - RNA, 19 nt, Artificial Sequence
  Synthetic
uggaagagugccagcgaaa

SEQ ID NO: 12939 - RNA, 19 nt, Artificial Sequence
  Synthetic
aagaagaagcgcuggaaca

SEQ ID NO: 12940 - RNA, 19 nt, Artificial Sequence
  Synthetic
gcaaggacaucgaggagca

SEQ ID NO: 12941 - RNA, 19 nt, Artificial Sequence
  Synthetic
guggaugagaagaggaaga

SEQ ID NO: 12942 - RNA, 19 nt, Artificial Sequence
  Synthetic
aggccaagcacgacaagua

SEQ ID NO: 12943 - RNA, 19 nt, Artificial Sequence
  Synthetic
agcgaaaccacgaggguga

SEQ ID NO: 12944 - RNA, 19 nt, Artificial Sequence
  Synthetic
gcauugaggccaagcacga

SEQ ID NO: 12945 - RNA, 19 nt, Artificial Sequence
  Synthetic
acaaguacauggcggacau

SEQ ID NO: 12946 - RNA, 19 nt, Artificial Sequence
  Synthetic
gugagagggagcuggaaga

SEQ ID NO: 12947 - RNA, 19 nt, Artificial Sequence
  Synthetic
agguggaugagaagaggaa

SEQ ID NO: 12948 - RNA, 19 nt, Artificial Sequence
  Synthetic
aagaggaagaagcgagaca

SEQ ID NO: 12949 - RNA, 19 nt, Artificial Sequence
  Synthetic
agaagaggaagaagcgaga

SEQ ID NO: 12950 - RNA, 19 nt, Artificial Sequence
  Synthetic
auggcuggguggaggacua

SEQ ID NO: 12951 - RNA, 19 nt, Artificial Sequence
  Synthetic
gcuuugagcugaugcggga

SEQ ID NO: 12952 - RNA, 19 nt, Artificial Sequence
  Synthetic
guggaggacuacugagguu

SEQ ID NO: 12953 - RNA, 19 nt, Artificial Sequence
  Synthetic
uggcuaugaaggagguuau

SEQ ID NO: 12954 - RNA, 19 nt, Artificial Sequence
  Synthetic
agggcaaggaggagaagga

SEQ ID NO: 12955 - RNA, 19 nt, Artificial Sequence
  Synthetic
cuaugaaggagguuauuga

SEQ ID NO: 12956 - RNA, 19 nt, Artificial Sequence
  Synthetic
gugaugaggacgacagcca

SEQ ID NO: 12957 - RNA, 19 nt, Artificial Sequence
  Synthetic
gagcuuacagccuggccaa

SEQ ID NO: 12958 - RNA, 19 nt, Artificial Sequence
  Synthetic
gcauccaccaggagagcga

SEQ ID NO: 12959 - RNA, 19 nt, Artificial Sequence
  Synthetic
ccacgagggugaugaggac

SEQ ID NO: 12960 - RNA, 19 nt, Artificial Sequence
  Synthetic
cgcugguggccguguauua

SEQ ID NO: 12961 - RNA, 19 nt, Artificial Sequence
  Synthetic
gaggaagaagcgagacauc

SEQ ID NO: 12962 - RNA, 19 nt, Artificial Sequence
  Synthetic
agauggagagcuaugauga

SEQ ID NO: 12963 - RNA, 19 nt, Artificial Sequence
  Synthetic
agagcgagcugcacuccua

SEQ ID NO: 12964 - RNA, 19 nt, Artificial Sequence
  Synthetic
cgaagaagaagcgcuggaa

SEQ ID NO: 12965 - RNA, 19 nt, Artificial Sequence
  Synthetic
ggagauggagagcuaugau

SEQ ID NO: 12966 - RNA, 19 nt, Artificial Sequence
  Synthetic
gaagagugccagcgaaacc

SEQ ID NO: 12967 - RNA, 19 nt, Artificial Sequence
  Synthetic
gagcagggcaaucgucugu

SEQ ID NO: 12968 - RNA, 19 nt, Artificial Sequence
  Synthetic
gggccaaggcggagaaaua

SEQ ID NO: 12969 - RNA, 19 nt, Artificial Sequence
  Synthetic
uaaugucacuggagaaaua

SEQ ID NO: 12970 - RNA, 19 nt, Artificial Sequence
  Synthetic
ggucagugcaccagauauu

SEQ ID NO: 12971 - RNA, 19 nt, Artificial Sequence
  Synthetic
ggagaagaaaagaagaaaa

SEQ ID NO: 12972 - RNA, 19 nt, Artificial Sequence
  Synthetic
uuaauaaguccguggaaaa

SEQ ID NO: 12973 - RNA, 19 nt, Artificial Sequence
  Synthetic
gcuaaugucacuggagaaa

SEQ ID NO: 12974 - RNA, 19 nt, Artificial Sequence
  Synthetic
gguggaaaggagcgaagaa

SEQ ID NO: 12975 - RNA, 19 nt, Artificial Sequence
  Synthetic
gaaccuugccuauggagaa

SEQ ID NO: 12976 - RNA, 19 nt, Artificial Sequence
  Synthetic
ggaggagaggacacggaaa

SEQ ID NO: 12977 - RNA, 19 nt, Artificial Sequence
  Synthetic
aggaacgagccaagaaauu

SEQ ID NO: 12978 - RNA, 19 nt, Artificial Sequence
  Synthetic
ggagaguguuucuuggaga

SEQ ID NO: 12979 - RNA, 19 nt, Artificial Sequence
  Synthetic
guacagagaugggcaauuu

SEQ ID NO: 12980 - RNA, 19 nt, Artificial Sequence
  Synthetic
aguuagaacgcgaggccau

SEQ ID NO: 12981 - RNA, 19 nt, Artificial Sequence
  Synthetic
ggaaaggagcgaagaacac

SEQ ID NO: 12982 - RNA, 19 nt, Artificial Sequence
  Synthetic
ggacagacagagagacgga

SEQ ID NO: 12983 - RNA, 19 nt, Artificial Sequence
  Synthetic
uuuaauaaguccguggaaa

SEQ ID NO: 12984 - RNA, 19 nt, Artificial Sequence
  Synthetic
gagcaaaauuucugugguu

SEQ ID NO: 12985 - RNA, 19 nt, Artificial Sequence
  Synthetic
uggaaaggagcgaagaaca

SEQ ID NO: 12986 - RNA, 19 nt, Artificial Sequence
  Synthetic
acacagaggaggagaggac

SEQ ID NO: 12987 - RNA, 19 nt, Artificial Sequence
  Synthetic
cagucaagcuuggaguuaa

SEQ ID NO: 12988 - RNA, 19 nt, Artificial Sequence
  Synthetic
uggucaguuuagaggauuu

SEQ ID NO: 12989 - RNA, 19 nt, Artificial Sequence
  Synthetic
caucaaggccuguaagaac

SEQ ID NO: 12990 - RNA, 19 nt, Artificial Sequence
  Synthetic
ucuccaaaucccagaauga

SEQ ID NO: 12991 - RNA, 19 nt, Artificial Sequence
  Synthetic
acaggaauuuggucaguuu

SEQ ID NO: 12992 - RNA, 19 nt, Artificial Sequence
  Synthetic
agacacggaaguuuaauua

SEQ ID NO: 12993 - RNA, 19 nt, Artificial Sequence
  Synthetic
gaggcaaacaugagacagu

SEQ ID NO: 12994 - RNA, 19 nt, Artificial Sequence
  Synthetic
gguuacaggaauuugguca

SEQ ID NO: 12995 - RNA, 19 nt, Artificial Sequence
  Synthetic
cuggcagguuacaggaauu

SEQ ID NO: 12996 - RNA, 19 nt, Artificial Sequence
  Synthetic
ccuugaacucauuuguuaa

SEQ ID NO: 12997 - RNA, 19 nt, Artificial Sequence
  Synthetic
ggaguuaacugucugggau

SEQ ID NO: 12998 - RNA, 19 nt, Artificial Sequence
  Synthetic
ccgcacagguagugagaua

SEQ ID NO: 12999 - RNA, 19 nt, Artificial Sequence
  Synthetic
gugaagaaaucaagagcaa

SEQ ID NO: 13000 - RNA, 19 nt, Artificial Sequence
  Synthetic
ccggaaagcagaugagaaa

SEQ ID NO: 13001 - RNA, 19 nt, Artificial Sequence
  Synthetic
agaaagaagaguagaagaa

SEQ ID NO: 13002 - RNA, 19 nt, Artificial Sequence
  Synthetic
ggucagaggaagugaagaa

SEQ ID NO: 13003 - RNA, 19 nt, Artificial Sequence
  Synthetic
ccagaagagccaaguguua

SEQ ID NO: 13004 - RNA, 19 nt, Artificial Sequence
  Synthetic
ggaaauagaguugaagaaa

SEQ ID NO: 13005 - RNA, 19 nt, Artificial Sequence
  Synthetic
aggaaauagaguugaagaa

SEQ ID NO: 13006 - RNA, 19 nt, Artificial Sequence
  Synthetic
augaguuacuggagauaaa

SEQ ID NO: 13007 - RNA, 19 nt, Artificial Sequence
  Synthetic
ccaaggaaauagaguugaa

SEQ ID NO: 13008 - RNA, 19 nt, Artificial Sequence
  Synthetic
ccacaaaccugcagugagu

SEQ ID NO: 13009 - RNA, 19 nt, Artificial Sequence
  Synthetic
gcgacuaaagaaugaguua

SEQ ID NO: 13010 - RNA, 19 nt, Artificial Sequence
  Synthetic
aagcaggguugguuaguaa

SEQ ID NO: 13011 - RNA, 19 nt, Artificial Sequence
  Synthetic
ccucaauggccaagcagaa

SEQ ID NO: 13012 - RNA, 19 nt, Artificial Sequence
  Synthetic
ccuggaagcuugauaagaa

SEQ ID NO: 13013 - RNA, 19 nt, Artificial Sequence
  Synthetic
ucaaagaagccaagaacuu

SEQ ID NO: 13014 - RNA, 19 nt, Artificial Sequence
  Synthetic
cauuggaagcugagaguga

SEQ ID NO: 13015 - RNA, 19 nt, Artificial Sequence
  Synthetic
uggaagaucuacagcauau

SEQ ID NO: 13016 - RNA, 19 nt, Artificial Sequence
  Synthetic
agaagaagaagaagacauu

SEQ ID NO: 13017 - RNA, 19 nt, Artificial Sequence
  Synthetic
agaagggucuagugagcua

SEQ ID NO: 13018 - RNA, 19 nt, Artificial Sequence
  Synthetic
aaagagagacagugggaca

SEQ ID NO: 13019 - RNA, 19 nt, Artificial Sequence
  Synthetic
caacagagucagcugcuaa

SEQ ID NO: 13020 - RNA, 19 nt, Artificial Sequence
  Synthetic
acccauaugugaagacuua

SEQ ID NO: 13021 - RNA, 19 nt, Artificial Sequence
  Synthetic
ggauaaacuucuggaacuu

SEQ ID NO: 13022 - RNA, 19 nt, Artificial Sequence
  Synthetic
acacuaaaucugugauaga

SEQ ID NO: 13023 - RNA, 19 nt, Artificial Sequence
  Synthetic
agaggaagaagaagaagaa

SEQ ID NO: 13024 - RNA, 19 nt, Artificial Sequence
  Synthetic
gcagaugagaaaaggauua

SEQ ID NO: 13025 - RNA, 19 nt, Artificial Sequence
  Synthetic
gcacagguagugagauaau

SEQ ID NO: 13026 - RNA, 19 nt, Artificial Sequence
  Synthetic
uaacauaggucuucagaaa

SEQ ID NO: 13027 - RNA, 19 nt, Artificial Sequence
  Synthetic
ccaagaacguuaaaggaaa

SEQ ID NO: 13028 - RNA, 19 nt, Artificial Sequence
  Synthetic
agaaggaacaccugagaaa

SEQ ID NO: 13029 - RNA, 19 nt, Artificial Sequence
  Synthetic
ggaaagaaugcuaggacuu

SEQ ID NO: 13030 - RNA, 19 nt, Artificial Sequence
  Synthetic
cauaaaucuuucagaguga

SEQ ID NO: 13031 - RNA, 19 nt, Artificial Sequence
  Synthetic
cagaagaggaggaggagga

SEQ ID NO: 13032 - RNA, 19 nt, Artificial Sequence
  Synthetic
cugagaugcuugugaagua

SEQ ID NO: 13033 - RNA, 19 nt, Artificial Sequence
  Synthetic
aagaggaggaggaggacaa

SEQ ID NO: 13034 - RNA, 19 nt, Artificial Sequence
  Synthetic
ggucuuagauugacagcau

SEQ ID NO: 13035 - RNA, 19 nt, Artificial Sequence
  Synthetic
agacauauguagagugugu

SEQ ID NO: 13036 - RNA, 19 nt, Artificial Sequence
  Synthetic
ggguauauacuuuuagcaa

SEQ ID NO: 13037 - RNA, 19 nt, Artificial Sequence
  Synthetic
gugcaaaucaacaaguuaa

SEQ ID NO: 13038 - RNA, 19 nt, Artificial Sequence
  Synthetic
aggcagaagaggaggagga

SEQ ID NO: 13039 - RNA, 19 nt, Artificial Sequence
  Synthetic
cgaaaagaauacugugaau

SEQ ID NO: 13040 - RNA, 19 nt, Artificial Sequence
  Synthetic
ccaauuuauucuccagaua

SEQ ID NO: 13041 - RNA, 19 nt, Artificial Sequence
  Synthetic
ccucaguggugguugaaaa

SEQ ID NO: 13042 - RNA, 19 nt, Artificial Sequence
  Synthetic
gaauaaaguaguugucuca

SEQ ID NO: 13043 - RNA, 19 nt, Artificial Sequence
  Synthetic
gcaaauggcauccggaaca

SEQ ID NO: 13044 - RNA, 19 nt, Artificial Sequence
  Synthetic
gguagaaauuggaguauuc

SEQ ID NO: 13045 - RNA, 19 nt, Artificial Sequence
  Synthetic
ucauagaucucgucgcuua

SEQ ID NO: 13046 - RNA, 19 nt, Artificial Sequence
  Synthetic
uggcaacucuugugaaauu

SEQ ID NO: 13047 - RNA, 19 nt, Artificial Sequence
  Synthetic
gcuuccaauucaagacaua

SEQ ID NO: 13048 - RNA, 19 nt, Artificial Sequence
  Synthetic
uguuaguggugguagaaau

SEQ ID NO: 13049 - RNA, 19 nt, Artificial Sequence
  Synthetic
aggacaaugaggaggaaga

SEQ ID NO: 13050 - RNA, 19 nt, Artificial Sequence
  Synthetic
caccaaagcuguuguacau

SEQ ID NO: 13051 - RNA, 19 nt, Artificial Sequence
  Synthetic
ucucauagaaagcguauaa

SEQ ID NO: 13052 - RNA, 19 nt, Artificial Sequence
  Synthetic
gggaaagaaugcuaggacu

SEQ ID NO: 13053 - RNA, 19 nt, Artificial Sequence
  Synthetic
ugucauagcuucugguguu

SEQ ID NO: 13054 - RNA, 19 nt, Artificial Sequence
  Synthetic
cggaaaauuuguuggcaga

SEQ ID NO: 13055 - RNA, 19 nt, Artificial Sequence
  Synthetic
cagguuagaaguuuagaaa

SEQ ID NO: 13056 - RNA, 19 nt, Artificial Sequence
  Synthetic
ggaaagaaggagaugaaua

SEQ ID NO: 13057 - RNA, 19 nt, Artificial Sequence
  Synthetic
ggaaugaaucagaagauaa

SEQ ID NO: 13058 - RNA, 19 nt, Artificial Sequence
  Synthetic
cuuuaguaaucgaggauaa

SEQ ID NO: 13059 - RNA, 19 nt, Artificial Sequence
  Synthetic
ccaagaaugugcagagaga

SEQ ID NO: 13060 - RNA, 19 nt, Artificial Sequence
  Synthetic
agaagaagcuuuucagaau

SEQ ID NO: 13061 - RNA, 19 nt, Artificial Sequence
  Synthetic
cagcauuacuuuauagcaa

SEQ ID NO: 13062 - RNA, 19 nt, Artificial Sequence
  Synthetic
gagcauagauaccaauuua

SEQ ID NO: 13063 - RNA, 19 nt, Artificial Sequence
  Synthetic
agacaaggaaagaggauga

SEQ ID NO: 13064 - RNA, 19 nt, Artificial Sequence
  Synthetic
gcaagaaucagaugaagaa

SEQ ID NO: 13065 - RNA, 19 nt, Artificial Sequence
  Synthetic
cagcaggauaugauggaaa

SEQ ID NO: 13066 - RNA, 19 nt, Artificial Sequence
  Synthetic
guacaagcugugaggacaa

SEQ ID NO: 13067 - RNA, 19 nt, Artificial Sequence
  Synthetic
ucaccaaacugauggaaaa

SEQ ID NO: 13068 - RNA, 19 nt, Artificial Sequence
  Synthetic
agaaggaguuugugacuau

SEQ ID NO: 13069 - RNA, 19 nt, Artificial Sequence
  Synthetic
gaacaguacuccacaaaca

SEQ ID NO: 13070 - RNA, 19 nt, Artificial Sequence
  Synthetic
cagaaagugaucauagaua

SEQ ID NO: 13071 - RNA, 19 nt, Artificial Sequence
  Synthetic
ggaaguaucuccagaggca

SEQ ID NO: 13072 - RNA, 19 nt, Artificial Sequence
  Synthetic
gagaugaauagaagaaaga

SEQ ID NO: 13073 - RNA, 19 nt, Artificial Sequence
  Synthetic
ccacaaaugccuaagcaga

SEQ ID NO: 13074 - RNA, 19 nt, Artificial Sequence
  Synthetic
gcaaacgacugauuacaua

SEQ ID NO: 13075 - RNA, 19 nt, Artificial Sequence
  Synthetic
guuagaacauaaagagcau

SEQ ID NO: 13076 - RNA, 19 nt, Artificial Sequence
  Synthetic
aagaaugugcagagagaca

SEQ ID NO: 13077 - RNA, 19 nt, Artificial Sequence
  Synthetic
gaaagaaaggaaagaagga

SEQ ID NO: 13078 - RNA, 19 nt, Artificial Sequence
  Synthetic
gcaacagaaggguagguua

SEQ ID NO: 13079 - RNA, 19 nt, Artificial Sequence
  Synthetic
uggcagcaguacagcauua

SEQ ID NO: 13080 - RNA, 19 nt, Artificial Sequence
  Synthetic
cugugagacaugugacaaa

SEQ ID NO: 13081 - RNA, 19 nt, Artificial Sequence
  Synthetic
gcagaauccugucguggaa

SEQ ID NO: 13082 - RNA, 19 nt, Artificial Sequence
  Synthetic
ggacaacgcagaagccaau

SEQ ID NO: 13083 - RNA, 19 nt, Artificial Sequence
  Synthetic
gaacauaccacgacaagca

SEQ ID NO: 13084 - RNA, 19 nt, Artificial Sequence
  Synthetic
guacuauuaugcuggacaa

SEQ ID NO: 13085 - RNA, 19 nt, Artificial Sequence
  Synthetic
cgcagaagccaauggguuu

SEQ ID NO: 13086 - RNA, 19 nt, Artificial Sequence
  Synthetic
caacuaagguaaaggcaaa

SEQ ID NO: 13087 - RNA, 19 nt, Artificial Sequence
  Synthetic
gcacuaauauccagauuua

SEQ ID NO: 13088 - RNA, 19 nt, Artificial Sequence
  Synthetic
gugaauaccuugagaagau

SEQ ID NO: 13089 - RNA, 19 nt, Artificial Sequence
  Synthetic
gagaaagaaaggagaauuu

SEQ ID NO: 13090 - RNA, 19 nt, Artificial Sequence
  Synthetic
cacauuaucuggagagaaa

SEQ ID NO: 13091 - RNA, 19 nt, Artificial Sequence
  Synthetic
gguuaugagcuguggaaau

SEQ ID NO: 13092 - RNA, 19 nt, Artificial Sequence
  Synthetic
uguuaaagcucuucacaaa

SEQ ID NO: 13093 - RNA, 19 nt, Artificial Sequence
  Synthetic
cauaagacauggaaagaga

SEQ ID NO: 13094 - RNA, 19 nt, Artificial Sequence
  Synthetic
gacaaggacuuuagguuua

SEQ ID NO: 13095 - RNA, 19 nt, Artificial Sequence
  Synthetic
uaacaaugcuucagaguca

SEQ ID NO: 13096 - RNA, 19 nt, Artificial Sequence
  Synthetic
ugaaaggaaaguagugaaa

SEQ ID NO: 13097 - RNA, 19 nt, Artificial Sequence
  Synthetic
gaaaggagcuuauaagaga

SEQ ID NO: 13098 - RNA, 19 nt, Artificial Sequence
  Synthetic
gaaaguauccagaaagauu

SEQ ID NO: 13099 - RNA, 19 nt, Artificial Sequence
  Synthetic
gaaugaaauuaccagguua

SEQ ID NO: 13100 - RNA, 19 nt, Artificial Sequence
  Synthetic
gucaagaacucaaggucua

SEQ ID NO: 13101 - RNA, 19 nt, Artificial Sequence
  Synthetic
ugacggaacugcagaaaga

SEQ ID NO: 13102 - RNA, 19 nt, Artificial Sequence
  Synthetic
agaacaacuucgagacauu

SEQ ID NO: 13103 - RNA, 19 nt, Artificial Sequence
  Synthetic
ugaugauagugaaaggaaa

SEQ ID NO: 13104 - RNA, 19 nt, Artificial Sequence
  Synthetic
caauguagaugaugaugaa

SEQ ID NO: 13105 - RNA, 19 nt, Artificial Sequence
  Synthetic
ggagaaacaccuuuaacaa

SEQ ID NO: 13106 - RNA, 19 nt, Artificial Sequence
  Synthetic
ugaugaagaugaagaugaa

SEQ ID NO: 13107 - RNA, 19 nt, Artificial Sequence
  Synthetic
cagaaauguuguugcugaa

SEQ ID NO: 13108 - RNA, 19 nt, Artificial Sequence
  Synthetic
guuaugagcuguggaaaua

SEQ ID NO: 13109 - RNA, 19 nt, Artificial Sequence
  Synthetic
cgacaaggacuuuagguuu

SEQ ID NO: 13110 - RNA, 19 nt, Artificial Sequence
  Synthetic
gcacugaauugacagguua

SEQ ID NO: 13111 - RNA, 19 nt, Artificial Sequence
  Synthetic
caguaaagcaggaguuuga

SEQ ID NO: 13112 - RNA, 19 nt, Artificial Sequence
  Synthetic
auggagagguacagaauuu

SEQ ID NO: 13113 - RNA, 19 nt, Artificial Sequence
  Synthetic
gcaauggagcagggagaaa

SEQ ID NO: 13114 - RNA, 19 nt, Artificial Sequence
  Synthetic
gggcaaccuuccugaauau

SEQ ID NO: 13115 - RNA, 19 nt, Artificial Sequence
  Synthetic
gaucaggaagucaaggaaa

SEQ ID NO: 13116 - RNA, 19 nt, Artificial Sequence
  Synthetic
cggaagaaccagcgggcuu

SEQ ID NO: 13117 - RNA, 19 nt, Artificial Sequence
  Synthetic
aggagaacgucaaggcuga

SEQ ID NO: 13118 - RNA, 19 nt, Artificial Sequence
  Synthetic
cuuaaagaucggagcguca

SEQ ID NO: 13119 - RNA, 19 nt, Artificial Sequence
  Synthetic
gugaugaggaugaggagca

SEQ ID NO: 13120 - RNA, 19 nt, Artificial Sequence
  Synthetic
uagugaauucagugagcaa

SEQ ID NO: 13121 - RNA, 19 nt, Artificial Sequence
  Synthetic
aggaagugccccaaggaaa

SEQ ID NO: 13122 - RNA, 19 nt, Artificial Sequence
  Synthetic
gagacagaggauagugaau

SEQ ID NO: 13123 - RNA, 19 nt, Artificial Sequence
  Synthetic
aagaugacguccagcgaca

SEQ ID NO: 13124 - RNA, 19 nt, Artificial Sequence
  Synthetic
gaugaggagcagauggaga

SEQ ID NO: 13125 - RNA, 19 nt, Artificial Sequence
  Synthetic
ggacaagaacggugaggug

SEQ ID NO: 13126 - RNA, 19 nt, Artificial Sequence
  Synthetic
gugaauucagugagcaaga

SEQ ID NO: 13127 - RNA, 19 nt, Artificial Sequence
  Synthetic
cugugaagcaggaguuuga

SEQ ID NO: 13128 - RNA, 19 nt, Artificial Sequence
  Synthetic
gugaagacgaguacagcga

SEQ ID NO: 13129 - RNA, 19 nt, Artificial Sequence
  Synthetic
uggagcagaucgaggcuga

SEQ ID NO: 13130 - RNA, 19 nt, Artificial Sequence
  Synthetic
acgaggacagcgagcgcaa

SEQ ID NO: 13131 - RNA, 19 nt, Artificial Sequence
  Synthetic
acgacagugaugaggauga

SEQ ID NO: 13132 - RNA, 19 nt, Artificial Sequence
  Synthetic
aggacgggcugaaggacca

SEQ ID NO: 13133 - RNA, 19 nt, Artificial Sequence
  Synthetic
guguguggacuaugccaaa

SEQ ID NO: 13134 - RNA, 19 nt, Artificial Sequence
  Synthetic
agcgcaagguggugaagau

SEQ ID NO: 13135 - RNA, 19 nt, Artificial Sequence
  Synthetic
agauggagacagaggauag

SEQ ID NO: 13136 - RNA, 19 nt, Artificial Sequence
  Synthetic
gagaguucauggagagccu

SEQ ID NO: 13137 - RNA, 19 nt, Artificial Sequence
  Synthetic
acuacaacuacgacaguga

SEQ ID NO: 13138 - RNA, 19 nt, Artificial Sequence
  Synthetic
ggucaaagcugguucugug

SEQ ID NO: 13139 - RNA, 19 nt, Artificial Sequence
  Synthetic
cugacagccugaagcccua

SEQ ID NO: 13140 - RNA, 19 nt, Artificial Sequence
  Synthetic
gcacagacucaauggagcu

SEQ ID NO: 13141 - RNA, 19 nt, Artificial Sequence
  Synthetic
acauaaaacacgaccccaa

SEQ ID NO: 13142 - RNA, 19 nt, Artificial Sequence
  Synthetic
gggaagauuugaagacuua

SEQ ID NO: 13143 - RNA, 19 nt, Artificial Sequence
  Synthetic
gcaccauguuugaaggaua

SEQ ID NO: 13144 - RNA, 19 nt, Artificial Sequence
  Synthetic
gagcaggagaggaaagaua

SEQ ID NO: 13145 - RNA, 19 nt, Artificial Sequence
  Synthetic
cauauuugcucuagaagaa

SEQ ID NO: 13146 - RNA, 19 nt, Artificial Sequence
  Synthetic
gcggaaagcugugaagaua

SEQ ID NO: 13147 - RNA, 19 nt, Artificial Sequence
  Synthetic
ucacaagagucaacauuaa

SEQ ID NO: 13148 - RNA, 19 nt, Artificial Sequence
  Synthetic
cagcaugaguacaagaaau

SEQ ID NO: 13149 - RNA, 19 nt, Artificial Sequence
  Synthetic
gcuaagaaguuuggaauca

SEQ ID NO: 13150 - RNA, 19 nt, Artificial Sequence
  Synthetic
gggacgagcaagugcagaa

SEQ ID NO: 13151 - RNA, 19 nt, Artificial Sequence
  Synthetic
cagacuugguacugaggaa

SEQ ID NO: 13152 - RNA, 19 nt, Artificial Sequence
  Synthetic
caaaguuggaugaagcuaa

SEQ ID NO: 13153 - RNA, 19 nt, Artificial Sequence
  Synthetic
caaaaggacagaagagcaa

SEQ ID NO: 13154 - RNA, 19 nt, Artificial Sequence
  Synthetic
uacaagaaauggcaggaaa

SEQ ID NO: 13155 - RNA, 19 nt, Artificial Sequence
  Synthetic
ggaauugcauccaagguau

SEQ ID NO: 13156 - RNA, 19 nt, Artificial Sequence
  Synthetic
cagaagagcaacugagauc

SEQ ID NO: 13157 - RNA, 19 nt, Artificial Sequence
  Synthetic
gcacaauggcugaacaagu

SEQ ID NO: 13158 - RNA, 19 nt, Artificial Sequence
  Synthetic
acaagaaauggcaggaaaa

SEQ ID NO: 13159 - RNA, 19 nt, Artificial Sequence
  Synthetic
gaaaaugagaugaaggaga

SEQ ID NO: 13160 - RNA, 19 nt, Artificial Sequence
  Synthetic
gcucaaggaaacagacaca

SEQ ID NO: 13161 - RNA, 19 nt, Artificial Sequence
  Synthetic
aaaaugagaugaaggagaa

SEQ ID NO: 13162 - RNA, 19 nt, Artificial Sequence
  Synthetic
caauaggaaggcuaaauaa

SEQ ID NO: 13163 - RNA, 19 nt, Artificial Sequence
  Synthetic
caacucacuggaagaaaua

SEQ ID NO: 13164 - RNA, 19 nt, Artificial Sequence
  Synthetic
ccaguaaccaugaguauga

SEQ ID NO: 13165 - RNA, 19 nt, Artificial Sequence
  Synthetic
uuugaaaguggguggaauu

SEQ ID NO: 13166 - RNA, 19 nt, Artificial Sequence
  Synthetic
acaacucacuggaagaaau

SEQ ID NO: 13167 - RNA, 19 nt, Artificial Sequence
  Synthetic
aguacuuaauggugauaga

SEQ ID NO: 13168 - RNA, 19 nt, Artificial Sequence
  Synthetic
aaacgaacggugacggcaa

SEQ ID NO: 13169 - RNA, 19 nt, Artificial Sequence
  Synthetic
agagauuucaugaggccaa

SEQ ID NO: 13170 - RNA, 19 nt, Artificial Sequence
  Synthetic
ucauugaagcucagaauca

SEQ ID NO: 13171 - RNA, 19 nt, Artificial Sequence
  Synthetic
aggcuuuguauuugagcaa

SEQ ID NO: 13172 - RNA, 19 nt, Artificial Sequence
  Synthetic
cgaagaagcacgaacgaau

SEQ ID NO: 13173 - RNA, 19 nt, Artificial Sequence
  Synthetic
ccguccaguugguggguaa

SEQ ID NO: 13174 - RNA, 19 nt, Artificial Sequence
  Synthetic
acuuaugcguguagacauu

SEQ ID NO: 13175 - RNA, 19 nt, Artificial Sequence
  Synthetic
caagaagauuggucuguuu

SEQ ID NO: 13176 - RNA, 19 nt, Artificial Sequence
  Synthetic
ccgcagagauacugacugu

SEQ ID NO: 13177 - RNA, 19 nt, Artificial Sequence
  Synthetic
uggcugagaucgcgguauu

SEQ ID NO: 13178 - RNA, 19 nt, Artificial Sequence
  Synthetic
cagccaaggcgaagaagca

SEQ ID NO: 13179 - RNA, 19 nt, Artificial Sequence
  Synthetic
ggaaggaguucgugcgcac

SEQ ID NO: 13180 - RNA, 19 nt, Artificial Sequence
  Synthetic
ccugguuacugcagaugaa

SEQ ID NO: 13181 - RNA, 19 nt, Artificial Sequence
  Synthetic
gggaaugcgcgugggagaa

SEQ ID NO: 13182 - RNA, 19 nt, Artificial Sequence
  Synthetic
aggcagagaucgaagccgu

SEQ ID NO: 13183 - RNA, 19 nt, Artificial Sequence
  Synthetic
ccggugacuuccacaagaa

SEQ ID NO: 13184 - RNA, 19 nt, Artificial Sequence
  Synthetic
gcgaagaagcacgaacgaa

SEQ ID NO: 13185 - RNA, 19 nt, Artificial Sequence
  Synthetic
ccugggagaaccaccauaa

SEQ ID NO: 13186 - RNA, 19 nt, Artificial Sequence
  Synthetic
gggagaaccaccauaauuc

SEQ ID NO: 13187 - RNA, 19 nt, Artificial Sequence
  Synthetic
ccacccugaccuacacaua

SEQ ID NO: 13188 - RNA, 19 nt, Artificial Sequence
  Synthetic
gagaccagcaguacgagau

SEQ ID NO: 13189 - RNA, 19 nt, Artificial Sequence
  Synthetic
gcugagaucgcgguauuaa

SEQ ID NO: 13190 - RNA, 19 nt, Artificial Sequence
  Synthetic
gugaagacauuucucaacu

SEQ ID NO: 13191 - RNA, 19 nt, Artificial Sequence
  Synthetic
ugggagaaccaccauaauu

SEQ ID NO: 13192 - RNA, 19 nt, Artificial Sequence
  Synthetic
gguauuaaaucugugaaag

SEQ ID NO: 13193 - RNA, 19 nt, Artificial Sequence
  Synthetic
gaagaagcacgaacgaaug

SEQ ID NO: 13194 - RNA, 19 nt, Artificial Sequence
  Synthetic
ugaagacauuucucaacuu

SEQ ID NO: 13195 - RNA, 19 nt, Artificial Sequence
  Synthetic
ugagaucgcgguauuaaau

SEQ ID NO: 13196 - RNA, 19 nt, Artificial Sequence
  Synthetic
ugacugugccggugacuuc

SEQ ID NO: 13197 - RNA, 19 nt, Artificial Sequence
  Synthetic
acaagaagauuggucuguu

SEQ ID NO: 13198 - RNA, 19 nt, Artificial Sequence
  Synthetic
gaaccaccauaauucugaa

SEQ ID NO: 13199 - RNA, 19 nt, Artificial Sequence
  Synthetic
gaaccacgacgggcagaga

SEQ ID NO: 13200 - RNA, 19 nt, Artificial Sequence
  Synthetic
ggccggaguuuggcugaga

SEQ ID NO: 13201 - RNA, 19 nt, Artificial Sequence
  Synthetic
ggugaagacauuucucaac

SEQ ID NO: 13202 - RNA, 19 nt, Artificial Sequence
  Synthetic
ugaaaagccuggagggaaa

SEQ ID NO: 13203 - RNA, 19 nt, Artificial Sequence
  Synthetic
ggacugaccgggugagaaa

SEQ ID NO: 13204 - RNA, 19 nt, Artificial Sequence
  Synthetic
agaucaagaacuagagaua

SEQ ID NO: 13205 - RNA, 19 nt, Artificial Sequence
  Synthetic
ggacaaggaaugugauauu

SEQ ID NO: 13206 - RNA, 19 nt, Artificial Sequence
  Synthetic
uagcagaccuagagggaga

SEQ ID NO: 13207 - RNA, 19 nt, Artificial Sequence
  Synthetic
ccauauaaccauagacaca

SEQ ID NO: 13208 - RNA, 19 nt, Artificial Sequence
  Synthetic
gcggaaaauucaagaacaa

SEQ ID NO: 13209 - RNA, 19 nt, Artificial Sequence
  Synthetic
cccaagagcuggauauuaa

SEQ ID NO: 13210 - RNA, 19 nt, Artificial Sequence
  Synthetic
ugauaaggauucugaagua

SEQ ID NO: 13211 - RNA, 19 nt, Artificial Sequence
  Synthetic
aggaagacccggagccuaa

SEQ ID NO: 13212 - RNA, 19 nt, Artificial Sequence
  Synthetic
caucagacagagagacaaa

SEQ ID NO: 13213 - RNA, 19 nt, Artificial Sequence
  Synthetic
aaucaaagaaggaagagaa

SEQ ID NO: 13214 - RNA, 19 nt, Artificial Sequence
  Synthetic
acgaaaugcuucuguguau

SEQ ID NO: 13215 - RNA, 19 nt, Artificial Sequence
  Synthetic
aagaacaaaugcuaggaaa

SEQ ID NO: 13216 - RNA, 19 nt, Artificial Sequence
  Synthetic
gggaagaaaagaaugaaaa

SEQ ID NO: 13217 - RNA, 19 nt, Artificial Sequence
  Synthetic
ggauacagaaugugacaau

SEQ ID NO: 13218 - RNA, 19 nt, Artificial Sequence
  Synthetic
agugaugauucuucagaua

SEQ ID NO: 13219 - RNA, 19 nt, Artificial Sequence
  Synthetic
cgauccagaagcagggaaa

SEQ ID NO: 13220 - RNA, 19 nt, Artificial Sequence
  Synthetic
gcagaaauagagaucguua

SEQ ID NO: 13221 - RNA, 19 nt, Artificial Sequence
  Synthetic
gagcagaaauagagaucgu

SEQ ID NO: 13222 - RNA, 19 nt, Artificial Sequence
  Synthetic
accuagagauguugaaauu

SEQ ID NO: 13223 - RNA, 19 nt, Artificial Sequence
  Synthetic
ugaugaaacuccaggacca

SEQ ID NO: 13224 - RNA, 19 nt, Artificial Sequence
  Synthetic
gaagaaucauagaaagcau

SEQ ID NO: 13225 - RNA, 19 nt, Artificial Sequence
  Synthetic
gagccuaaguguagagaua

SEQ ID NO: 13226 - RNA, 19 nt, Artificial Sequence
  Synthetic
uggaaaggaugaacaaaua

SEQ ID NO: 13227 - RNA, 19 nt, Artificial Sequence
  Synthetic
ggaaauguguuauaagcua

SEQ ID NO: 13228 - RNA, 19 nt, Artificial Sequence
  Synthetic
agaagaagcauaagaaaca

SEQ ID NO: 13229 - RNA, 19 nt, Artificial Sequence
  Synthetic
uagcagugaucaugguaaa

SEQ ID NO: 13230 - RNA, 19 nt, Artificial Sequence
  Synthetic
cagguuaaauugaggcauu

SEQ ID NO: 13231 - RNA, 19 nt, Artificial Sequence
  Synthetic
gcucauggaucuuuaguga

SEQ ID NO: 13232 - RNA, 19 nt, Artificial Sequence
  Synthetic
ugaaagaauacgagguaaa

SEQ ID NO: 13233 - RNA, 19 nt, Artificial Sequence
  Synthetic
ggaccaagcuggaagccaa

SEQ ID NO: 13234 - RNA, 19 nt, Artificial Sequence
  Synthetic
gcgagagccuggagaagaa

SEQ ID NO: 13235 - RNA, 19 nt, Artificial Sequence
  Synthetic
gcucggugcuggaggcaaa

SEQ ID NO: 13236 - RNA, 19 nt, Artificial Sequence
  Synthetic
cgguagagggugagaaaca

SEQ ID NO: 13237 - RNA, 19 nt, Artificial Sequence
  Synthetic
cagcacagccugcggguaa

SEQ ID NO: 13238 - RNA, 19 nt, Artificial Sequence
  Synthetic
gggagaaguuucaggacca

SEQ ID NO: 13239 - RNA, 19 nt, Artificial Sequence
  Synthetic
gcauauaugaagaaggcau

SEQ ID NO: 13240 - RNA, 19 nt, Artificial Sequence
  Synthetic
ccugaaagaauacgaggua

SEQ ID NO: 13241 - RNA, 19 nt, Artificial Sequence
  Synthetic
agacagaguuauuaaacca

SEQ ID NO: 13242 - RNA, 19 nt, Artificial Sequence
  Synthetic
gcucacgaagacagaguua

SEQ ID NO: 13243 - RNA, 19 nt, Artificial Sequence
  Synthetic
gagcagacgugaaggcgca

SEQ ID NO: 13244 - RNA, 19 nt, Artificial Sequence
  Synthetic
gacgguagagggugagaaa

SEQ ID NO: 13245 - RNA, 19 nt, Artificial Sequence
  Synthetic
uggcugacuuggagcagaa

SEQ ID NO: 13246 - RNA, 19 nt, Artificial Sequence
  Synthetic
ucacgaagacagaguuauu

SEQ ID NO: 13247 - RNA, 19 nt, Artificial Sequence
  Synthetic
gagcagaaggucuuggaga

SEQ ID NO: 13248 - RNA, 19 nt, Artificial Sequence
  Synthetic
agaaacagcaggagcacga

SEQ ID NO: 13249 - RNA, 19 nt, Artificial Sequence
  Synthetic
agcagaaggucuuggagau

SEQ ID NO: 13250 - RNA, 19 nt, Artificial Sequence
  Synthetic
ccgaaugucccgcgugcaa

SEQ ID NO: 13251 - RNA, 19 nt, Artificial Sequence
  Synthetic
cugaaagaauacgagguaa

SEQ ID NO: 13252 - RNA, 19 nt, Artificial Sequence
  Synthetic
ucgagacgguagaggguga

SEQ ID NO: 13253 - RNA, 19 nt, Artificial Sequence
  Synthetic
acgaagacagaguuauuaa

SEQ ID NO: 13254 - RNA, 19 nt, Artificial Sequence
  Synthetic
gugagaaacagcaggagca

SEQ ID NO: 13255 - RNA, 19 nt, Artificial Sequence
  Synthetic
aagaauacgagguaaagau

SEQ ID NO: 13256 - RNA, 19 nt, Artificial Sequence
  Synthetic
cauauaugaagaaggcauu

SEQ ID NO: 13257 - RNA, 19 nt, Artificial Sequence
  Synthetic
ccaagauggaggcaaagaa

SEQ ID NO: 13258 - RNA, 19 nt, Artificial Sequence
  Synthetic
ucucagacuucgccaggaa

SEQ ID NO: 13259 - RNA, 19 nt, Artificial Sequence
  Synthetic
ugaaagaauacgagagcug

SEQ ID NO: 13260 - RNA, 19 nt, Artificial Sequence
  Synthetic
caagauggaggcaaagaau

SEQ ID NO: 13261 - RNA, 19 nt, Artificial Sequence
  Synthetic
ggucagagcuccugcagag

SEQ ID NO: 13262 - RNA, 19 nt, Artificial Sequence
  Synthetic
ggacaaaccagcagaucaa

SEQ ID NO: 13263 - RNA, 19 nt, Artificial Sequence
  Synthetic
gauaagguguuuaaggaua

SEQ ID NO: 13264 - RNA, 19 nt, Artificial Sequence
  Synthetic
caucaugcguggagaauau

SEQ ID NO: 13265 - RNA, 19 nt, Artificial Sequence
  Synthetic
ggaaaugcuucgaaauaau

SEQ ID NO: 13266 - RNA, 19 nt, Artificial Sequence
  Synthetic
cguccugacugcaaagaaa

SEQ ID NO: 13267 - RNA, 19 nt, Artificial Sequence
  Synthetic
aaggaaaugcuucgaaaua

SEQ ID NO: 13268 - RNA, 19 nt, Artificial Sequence
  Synthetic
caaggagguuacaaggaaa

SEQ ID NO: 13269 - RNA, 19 nt, Artificial Sequence
  Synthetic
gcagaaugaaaguguagaa

SEQ ID NO: 13270 - RNA, 19 nt, Artificial Sequence
  Synthetic
ccuuaaacuugaacaccaa

SEQ ID NO: 13271 - RNA, 19 nt, Artificial Sequence
  Synthetic
ugaagaccguggaggacaa

SEQ ID NO: 13272 - RNA, 19 nt, Artificial Sequence
  Synthetic
cagagaagguuuucauuuu

SEQ ID NO: 13273 - RNA, 19 nt, Artificial Sequence
  Synthetic
ggagguggauuuagcagaa

SEQ ID NO: 13274 - RNA, 19 nt, Artificial Sequence
  Synthetic
aggaaaugcuucgaaauaa

SEQ ID NO: 13275 - RNA, 19 nt, Artificial Sequence
  Synthetic
ccguuuaagcagaaaguga

SEQ ID NO: 13276 - RNA, 19 nt, Artificial Sequence
  Synthetic
gaaugaaagcagagguugu

SEQ ID NO: 13277 - RNA, 19 nt, Artificial Sequence
  Synthetic
gauaaauauugcugucaga

SEQ ID NO: 13278 - RNA, 19 nt, Artificial Sequence
  Synthetic
cggaaugaaagcagagguu

SEQ ID NO: 13279 - RNA, 19 nt, Artificial Sequence
  Synthetic
gggaggaagcagacagcau

SEQ ID NO: 13280 - RNA, 19 nt, Artificial Sequence
  Synthetic
aaaauggagucgaguaaaa

SEQ ID NO: 13281 - RNA, 19 nt, Artificial Sequence
  Synthetic
agacagccaagcagagaaa

SEQ ID NO: 13282 - RNA, 19 nt, Artificial Sequence
  Synthetic
cguuaaagauaagguguuu

SEQ ID NO: 13283 - RNA, 19 nt, Artificial Sequence
  Synthetic
cugaaggaguggagcaacu

SEQ ID NO: 13284 - RNA, 19 nt, Artificial Sequence
  Synthetic
ccaaacuguucuagaaaau

SEQ ID NO: 13285 - RNA, 19 nt, Artificial Sequence
  Synthetic
guggagaaggcguguaaau

SEQ ID NO: 13286 - RNA, 19 nt, Artificial Sequence
  Synthetic
acaaggagguuacaaggaa

SEQ ID NO: 13287 - RNA, 19 nt, Artificial Sequence
  Synthetic
gggacaaaccagcagauca

SEQ ID NO: 13288 - RNA, 19 nt, Artificial Sequence
  Synthetic
ucauuuacagcgagugaua

SEQ ID NO: 13289 - RNA, 19 nt, Artificial Sequence
  Synthetic
aaauauugcugucagagaa

SEQ ID NO: 13290 - RNA, 19 nt, Artificial Sequence
  Synthetic
ccguggaggacaaguacaa

SEQ ID NO: 13291 - RNA, 19 nt, Artificial Sequence
  Synthetic
cagagaaacugaaggagcu

SEQ ID NO: 13292 - RNA, 19 nt, Artificial Sequence
  Synthetic
acuacaaguuccuggagaa

SEQ ID NO: 13293 - RNA, 19 nt, Artificial Sequence
  Synthetic
gggagaaaggguaguucaa

SEQ ID NO: 13294 - RNA, 19 nt, Artificial Sequence
  Synthetic
gacccaaacuggaagaauu

SEQ ID NO: 13295 - RNA, 19 nt, Artificial Sequence
  Synthetic
ggucaugaagggcuggaaa

SEQ ID NO: 13296 - RNA, 19 nt, Artificial Sequence
  Synthetic
gagaaaggguaguucaaag

SEQ ID NO: 13297 - RNA, 19 nt, Artificial Sequence
  Synthetic
agaaaggguaguucaaaga

SEQ ID NO: 13298 - RNA, 19 nt, Artificial Sequence
  Synthetic
uggacuaugccaagaucua

SEQ ID NO: 13299 - RNA, 19 nt, Artificial Sequence
  Synthetic
gcacuaaggaguucgucuu

SEQ ID NO: 13300 - RNA, 19 nt, Artificial Sequence
  Synthetic
gagagugucuacugugaga

SEQ ID NO: 13301 - RNA, 19 nt, Artificial Sequence
  Synthetic
gaaacuaugugcgggauga

SEQ ID NO: 13302 - RNA, 19 nt, Artificial Sequence
  Synthetic
acccaaacuggaagaauuu

SEQ ID NO: 13303 - RNA, 19 nt, Artificial Sequence
  Synthetic
gagugucuacugugagaau

SEQ ID NO: 13304 - RNA, 19 nt, Artificial Sequence
  Synthetic
ggagcuggaaguacaagua

SEQ ID NO: 13305 - RNA, 19 nt, Artificial Sequence
  Synthetic
ggagaaaggguaguucaaa

SEQ ID NO: 13306 - RNA, 19 nt, Artificial Sequence
  Synthetic
ggccaccguuucugcgaua

SEQ ID NO: 13307 - RNA, 19 nt, Artificial Sequence
  Synthetic
caucugaaggacagcugua

SEQ ID NO: 13308 - RNA, 19 nt, Artificial Sequence
  Synthetic
cuaaggaguucgucuuuga

SEQ ID NO: 13309 - RNA, 19 nt, Artificial Sequence
  Synthetic
gcacacaccucucacugua

SEQ ID NO: 13310 - RNA, 19 nt, Artificial Sequence
  Synthetic
caugaagggcuggaaacaa

SEQ ID NO: 13311 - RNA, 19 nt, Artificial Sequence
  Synthetic
acccggagcuggaaguaca

SEQ ID NO: 13312 - RNA, 19 nt, Artificial Sequence
  Synthetic
aggagagugucuacuguga

SEQ ID NO: 13313 - RNA, 19 nt, Artificial Sequence
  Synthetic
cauccgugcugcuguugaa

SEQ ID NO: 13314 - RNA, 19 nt, Artificial Sequence
  Synthetic
augaagggcuggaaacaag

SEQ ID NO: 13315 - RNA, 19 nt, Artificial Sequence
  Synthetic
ucuggaagauuggcagcua

SEQ ID NO: 13316 - RNA, 19 nt, Artificial Sequence
  Synthetic
gcgccucaagugcgaguuu

SEQ ID NO: 13317 - RNA, 19 nt, Artificial Sequence
  Synthetic
gcuggaaguacaaguauug

SEQ ID NO: 13318 - RNA, 19 nt, Artificial Sequence
  Synthetic
guucucugggcuuugguua

SEQ ID NO: 13319 - RNA, 19 nt, Artificial Sequence
  Synthetic
ccacagcacgucacugaga

SEQ ID NO: 13320 - RNA, 19 nt, Artificial Sequence
  Synthetic
cuucuacacacauaaguau

SEQ ID NO: 13321 - RNA, 19 nt, Artificial Sequence
  Synthetic
gaagauuggcagcuaugga

SEQ ID NO: 13322 - RNA, 19 nt, Artificial Sequence
  Synthetic
ggaauauacugaagaacua

SEQ ID NO: 13323 - RNA, 19 nt, Artificial Sequence
  Synthetic
cugaagaacuagaguguca

SEQ ID NO: 13324 - RNA, 19 nt, Artificial Sequence
  Synthetic
ggucaugcgaggagaguuu

SEQ ID NO: 13325 - RNA, 19 nt, Artificial Sequence
  Synthetic
gcuagaagcucaagugcau

SEQ ID NO: 13326 - RNA, 19 nt, Artificial Sequence
  Synthetic
cagaagagcauaaagguau

SEQ ID NO: 13327 - RNA, 19 nt, Artificial Sequence
  Synthetic
cuugaaagaugguaaguuu

SEQ ID NO: 13328 - RNA, 19 nt, Artificial Sequence
  Synthetic
ccaagaacgccuacauuaa

SEQ ID NO: 13329 - RNA, 19 nt, Artificial Sequence
  Synthetic
ggaaagaccugaaagagca

SEQ ID NO: 13330 - RNA, 19 nt, Artificial Sequence
  Synthetic
cgaaauagugauuaaguga

SEQ ID NO: 13331 - RNA, 19 nt, Artificial Sequence
  Synthetic
ggauguaaugccaagguua

SEQ ID NO: 13332 - RNA, 19 nt, Artificial Sequence
  Synthetic
ggacacagagguagcagaa

SEQ ID NO: 13333 - RNA, 19 nt, Artificial Sequence
  Synthetic
ggaggaaccugcagcaaca

SEQ ID NO: 13334 - RNA, 19 nt, Artificial Sequence
  Synthetic
uugauaagccugaguuuaa

SEQ ID NO: 13335 - RNA, 19 nt, Artificial Sequence
  Synthetic
acaaacaguucgaauguau

SEQ ID NO: 13336 - RNA, 19 nt, Artificial Sequence
  Synthetic
cccaauagcagcagcuuua

SEQ ID NO: 13337 - RNA, 19 nt, Artificial Sequence
  Synthetic
aaacugagguagaugaaca

SEQ ID NO: 13338 - RNA, 19 nt, Artificial Sequence
  Synthetic
acacauacauauacaccua

SEQ ID NO: 13339 - RNA, 19 nt, Artificial Sequence
  Synthetic
ccaauuagaagaacagauu

SEQ ID NO: 13340 - RNA, 19 nt, Artificial Sequence
  Synthetic
gauuacaagaugaagaaga

SEQ ID NO: 13341 - RNA, 19 nt, Artificial Sequence
  Synthetic
gugcgaagauuauucuaaa

SEQ ID NO: 13342 - RNA, 19 nt, Artificial Sequence
  Synthetic
gaucccagaacaaggaaua

SEQ ID NO: 13343 - RNA, 19 nt, Artificial Sequence
  Synthetic
auaaagcacagcugaguaa

SEQ ID NO: 13344 - RNA, 19 nt, Artificial Sequence
  Synthetic
ccauucaggcagaggguga

SEQ ID NO: 13345 - RNA, 19 nt, Artificial Sequence
  Synthetic
gagcaagacuguccuuuua

SEQ ID NO: 13346 - RNA, 19 nt, Artificial Sequence
  Synthetic
gguacuugcuauaauggaa

SEQ ID NO: 13347 - RNA, 19 nt, Artificial Sequence
  Synthetic
ggaagaucauauugcugua

SEQ ID NO: 13348 - RNA, 19 nt, Artificial Sequence
  Synthetic
ugacagauuacaagaugaa

SEQ ID NO: 13349 - RNA, 19 nt, Artificial Sequence
  Synthetic
ggagaaaaccuuuacaauu

SEQ ID NO: 13350 - RNA, 19 nt, Artificial Sequence
  Synthetic
ucaucaaucuacagaauca

SEQ ID NO: 13351 - RNA, 19 nt, Artificial Sequence
  Synthetic
uuaaguaguugauguggaa

SEQ ID NO: 13352 - RNA, 19 nt, Artificial Sequence
  Synthetic
guucauaguuugagcguua

SEQ ID NO: 13353 - RNA, 19 nt, Artificial Sequence
  Synthetic
ggagaaaccuguugugauu

SEQ ID NO: 13354 - RNA, 19 nt, Artificial Sequence
  Synthetic
ggacaaaguugcugaaauc

SEQ ID NO: 13355 - RNA, 19 nt, Artificial Sequence
  Synthetic
gggauaugauguagaguuu

SEQ ID NO: 13356 - RNA, 19 nt, Artificial Sequence
  Synthetic
augaaaagaugcagaggaa

SEQ ID NO: 13357 - RNA, 19 nt, Artificial Sequence
  Synthetic
gaaccauaauccuuggaaa

SEQ ID NO: 13358 - RNA, 19 nt, Artificial Sequence
  Synthetic
ggugaaauguccaaaugaa

SEQ ID NO: 13359 - RNA, 19 nt, Artificial Sequence
  Synthetic
augaaauacugcuggaaaa

SEQ ID NO: 13360 - RNA, 19 nt, Artificial Sequence
  Synthetic
gcucauuuauggaggagau

SEQ ID NO: 13361 - RNA, 19 nt, Artificial Sequence
  Synthetic
gcaaaaccacgaagagaua

SEQ ID NO: 13362 - RNA, 19 nt, Artificial Sequence
  Synthetic
gcaaaugucaucugugaau

SEQ ID NO: 13363 - RNA, 19 nt, Artificial Sequence
  Synthetic
ccacacaaugcaaggagaa

SEQ ID NO: 13364 - RNA, 19 nt, Artificial Sequence
  Synthetic
aggacaaaguugcugaaau

SEQ ID NO: 13365 - RNA, 19 nt, Artificial Sequence
  Synthetic
cuggaagcccuaagacaaa

SEQ ID NO: 13366 - RNA, 19 nt, Artificial Sequence
  Synthetic
agagauaauggaugccaaa

SEQ ID NO: 13367 - RNA, 19 nt, Artificial Sequence
  Synthetic
cuggaaagcaaguaugaau

SEQ ID NO: 13368 - RNA, 19 nt, Artificial Sequence
  Synthetic
gauaugauguagaguuuga

SEQ ID NO: 13369 - RNA, 19 nt, Artificial Sequence
  Synthetic
cauuaaggaugacacauua

SEQ ID NO: 13370 - RNA, 19 nt, Artificial Sequence
  Synthetic
ugagacaucuugaggauca

SEQ ID NO: 13371 - RNA, 19 nt, Artificial Sequence
  Synthetic
ccuuaaaacuucagucuuu

SEQ ID NO: 13372 - RNA, 19 nt, Artificial Sequence
  Synthetic
acacaaugcaaggagaaua

SEQ ID NO: 13373 - RNA, 19 nt, Artificial Sequence
  Synthetic
gaacagaugccuaaucauu

SEQ ID NO: 13374 - RNA, 19 nt, Artificial Sequence
  Synthetic
gcagcuauuuugccaguua

SEQ ID NO: 13375 - RNA, 19 nt, Artificial Sequence
  Synthetic
ggauccagccagucugaaa

SEQ ID NO: 13376 - RNA, 19 nt, Artificial Sequence
  Synthetic
ucaacuauuuccagacaau

SEQ ID NO: 13377 - RNA, 19 nt, Artificial Sequence
  Synthetic
ucagagaacagaugccuaa

SEQ ID NO: 13378 - RNA, 19 nt, Artificial Sequence
  Synthetic
cagaggauuugaaccauaa

SEQ ID NO: 13379 - RNA, 19 nt, Artificial Sequence
  Synthetic
agacagguuucuugugaca

SEQ ID NO: 13380 - RNA, 19 nt, Artificial Sequence
  Synthetic
caauaagggaugcagguca

SEQ ID NO: 13381 - RNA, 19 nt, Artificial Sequence
  Synthetic
ugaagcaccuguaaggcaa

SEQ ID NO: 13382 - RNA, 19 nt, Artificial Sequence
  Synthetic
gagagagacaggagaggaa

SEQ ID NO: 13383 - RNA, 19 nt, Artificial Sequence
  Synthetic
gggcaugagugcuguaauu

SEQ ID NO: 13384 - RNA, 19 nt, Artificial Sequence
  Synthetic
agaggaagcuguaagagaa

SEQ ID NO: 13385 - RNA, 19 nt, Artificial Sequence
  Synthetic
gggaauugaacgaagauga

SEQ ID NO: 13386 - RNA, 19 nt, Artificial Sequence
  Synthetic
uauaauguccucugggaaa

SEQ ID NO: 13387 - RNA, 19 nt, Artificial Sequence
  Synthetic
gaguuguaauguuuggaaa

SEQ ID NO: 13388 - RNA, 19 nt, Artificial Sequence
  Synthetic
aagagaagcugcugcugaa

SEQ ID NO: 13389 - RNA, 19 nt, Artificial Sequence
  Synthetic
gugaaugguuuuccguuua

SEQ ID NO: 13390 - RNA, 19 nt, Artificial Sequence
  Synthetic
gcacauguaucgaauuuau

SEQ ID NO: 13391 - RNA, 19 nt, Artificial Sequence
  Synthetic
agagagacuuauucgcuua

SEQ ID NO: 13392 - RNA, 19 nt, Artificial Sequence
  Synthetic
gugaugugcuacuguaaau

SEQ ID NO: 13393 - RNA, 19 nt, Artificial Sequence
  Synthetic
uggagaagccuguggagaa

SEQ ID NO: 13394 - RNA, 19 nt, Artificial Sequence
  Synthetic
gaaggaggcugaagaggaa

SEQ ID NO: 13395 - RNA, 19 nt, Artificial Sequence
  Synthetic
aaacaacaaugaagaggua

SEQ ID NO: 13396 - RNA, 19 nt, Artificial Sequence
  Synthetic
gugaagagcuggcugaaaa

SEQ ID NO: 13397 - RNA, 19 nt, Artificial Sequence
  Synthetic
aagaaagaauggagagaac

SEQ ID NO: 13398 - RNA, 19 nt, Artificial Sequence
  Synthetic
agauguauuucaaggacua

SEQ ID NO: 13399 - RNA, 19 nt, Artificial Sequence
  Synthetic
auaaguacuaugagcgaaa

SEQ ID NO: 13400 - RNA, 19 nt, Artificial Sequence
  Synthetic
ugagaagcuuauugaggaa

SEQ ID NO: 13401 - RNA, 19 nt, Artificial Sequence
  Synthetic
aaggaaaccuguaggaagu

SEQ ID NO: 13402 - RNA, 19 nt, Artificial Sequence
  Synthetic
cagauuauccaaagagaga

SEQ ID NO: 13403 - RNA, 19 nt, Artificial Sequence
  Synthetic
ccacugaagaugaugagaa

SEQ ID NO: 13404 - RNA, 19 nt, Artificial Sequence
  Synthetic
guuugaacaaggugacaua

SEQ ID NO: 13405 - RNA, 19 nt, Artificial Sequence
  Synthetic
gaguugaggucgggaguuu

SEQ ID NO: 13406 - RNA, 19 nt, Artificial Sequence
  Synthetic
ccucacugccgaaaggaaa

SEQ ID NO: 13407 - RNA, 19 nt, Artificial Sequence
  Synthetic
uggcagagcaugaagacuu

SEQ ID NO: 13408 - RNA, 19 nt, Artificial Sequence
  Synthetic
gaagaugaugagaagcuua

SEQ ID NO: 13409 - RNA, 19 nt, Artificial Sequence
  Synthetic
ggacuaaagugggcucuaa

SEQ ID NO: 13410 - RNA, 19 nt, Artificial Sequence
  Synthetic
aggaagaagagaaaacaaa

SEQ ID NO: 13411 - RNA, 19 nt, Artificial Sequence
  Synthetic
gaaaauaagcgacgacauu

SEQ ID NO: 13412 - RNA, 19 nt, Artificial Sequence
  Synthetic
gagacaaaguugccuaaaa

SEQ ID NO: 13413 - RNA, 19 nt, Artificial Sequence
  Synthetic
gagagaagacagaaucauu

SEQ ID NO: 13414 - RNA, 19 nt, Artificial Sequence
  Synthetic
ggcugaagaggaacagaaa

SEQ ID NO: 13415 - RNA, 19 nt, Artificial Sequence
  Synthetic
agagaagacagaaucauua

SEQ ID NO: 13416 - RNA, 19 nt, Artificial Sequence
  Synthetic
ggaaagaacauaauggccu

SEQ ID NO: 13417 - RNA, 19 nt, Artificial Sequence
  Synthetic
gaugaaugaagaacaguau

SEQ ID NO: 13418 - RNA, 19 nt, Artificial Sequence
  Synthetic
accagaaaccaguggaaaa

SEQ ID NO: 13419 - RNA, 19 nt, Artificial Sequence
  Synthetic
aacaagagcaggaguucua

SEQ ID NO: 13420 - RNA, 19 nt, Artificial Sequence
  Synthetic
aagagauggcagagcauga

SEQ ID NO: 13421 - RNA, 19 nt, Artificial Sequence
  Synthetic
gagcagaaaaucaaagaga

SEQ ID NO: 13422 - RNA, 19 nt, Artificial Sequence
  Synthetic
uggagaaggugcagagggu

SEQ ID NO: 13423 - RNA, 19 nt, Artificial Sequence
  Synthetic
uugaagaacuggaggagaa

SEQ ID NO: 13424 - RNA, 19 nt, Artificial Sequence
  Synthetic
agaaguagcugcauagaaa

SEQ ID NO: 13425 - RNA, 19 nt, Artificial Sequence
  Synthetic
gcacagaaguagcugcaua

SEQ ID NO: 13426 - RNA, 19 nt, Artificial Sequence
  Synthetic
ggaaguuucuagaggaaca

SEQ ID NO: 13427 - RNA, 19 nt, Artificial Sequence
  Synthetic
ugacuuggauucagaaaua

SEQ ID NO: 13428 - RNA, 19 nt, Artificial Sequence
  Synthetic
uggcuaacgugguggagaa

SEQ ID NO: 13429 - RNA, 19 nt, Artificial Sequence
  Synthetic
gaggaaguuucuagaggaa

SEQ ID NO: 13430 - RNA, 19 nt, Artificial Sequence
  Synthetic
ugucuuacacugagaaaua

SEQ ID NO: 13431 - RNA, 19 nt, Artificial Sequence
  Synthetic
gacauaagguauagccaua

SEQ ID NO: 13432 - RNA, 19 nt, Artificial Sequence
  Synthetic
gagaggagauucaagaaau

SEQ ID NO: 13433 - RNA, 19 nt, Artificial Sequence
  Synthetic
acacguggguggugaguau

SEQ ID NO: 13434 - RNA, 19 nt, Artificial Sequence
  Synthetic
gaaauccagucaagagaaa

SEQ ID NO: 13435 - RNA, 19 nt, Artificial Sequence
  Synthetic
gaucagaagccagggauua

SEQ ID NO: 13436 - RNA, 19 nt, Artificial Sequence
  Synthetic
caggaggacauaagguaua

SEQ ID NO: 13437 - RNA, 19 nt, Artificial Sequence
  Synthetic
caagaaauccagucaagaa

SEQ ID NO: 13438 - RNA, 19 nt, Artificial Sequence
  Synthetic
caucagaagcacucuaaua

SEQ ID NO: 13439 - RNA, 19 nt, Artificial Sequence
  Synthetic
cuaacgugguggagaacau

SEQ ID NO: 13440 - RNA, 19 nt, Artificial Sequence
  Synthetic
cucagaaacugcuagguaa

SEQ ID NO: 13441 - RNA, 19 nt, Artificial Sequence
  Synthetic
gcucagaaacugcuaggua

SEQ ID NO: 13442 - RNA, 19 nt, Artificial Sequence
  Synthetic
gaggucaagaaaugagaua

SEQ ID NO: 13443 - RNA, 19 nt, Artificial Sequence
  Synthetic
cugcagagggagaugaaga

SEQ ID NO: 13444 - RNA, 19 nt, Artificial Sequence
  Synthetic
gauagaaaugacugcuuua

SEQ ID NO: 13445 - RNA, 19 nt, Artificial Sequence
  Synthetic
ggauagaaaugacugcuuu

SEQ ID NO: 13446 - RNA, 19 nt, Artificial Sequence
  Synthetic
gaaaagagagagaggagau

SEQ ID NO: 13447 - RNA, 19 nt, Artificial Sequence
  Synthetic
aagaacuggaggagaagaa

SEQ ID NO: 13448 - RNA, 19 nt, Artificial Sequence
  Synthetic
ccaacuggcagcuggcuaa

SEQ ID NO: 13449 - RNA, 19 nt, Artificial Sequence
  Synthetic
gagaaggagcaguuaccua

SEQ ID NO: 13450 - RNA, 19 nt, Artificial Sequence
  Synthetic
uagcacaauuggagagcca

SEQ ID NO: 13451 - RNA, 19 nt, Artificial Sequence
  Synthetic
agaaaugacugcuuuagaa

SEQ ID NO: 13452 - RNA, 19 nt, Artificial Sequence
  Synthetic
caucugaggucaagaaaug

SEQ ID NO: 13453 - RNA, 19 nt, Artificial Sequence
  Synthetic
ccgaagaccucaaggcgaa

SEQ ID NO: 13454 - RNA, 19 nt, Artificial Sequence
  Synthetic
gggagaacgugaacaggaa

SEQ ID NO: 13455 - RNA, 19 nt, Artificial Sequence
  Synthetic
gaguagauguccuauaaua

SEQ ID NO: 13456 - RNA, 19 nt, Artificial Sequence
  Synthetic
agaagaugguggagagcca

SEQ ID NO: 13457 - RNA, 19 nt, Artificial Sequence
  Synthetic
gcauguugccauuggguuu

SEQ ID NO: 13458 - RNA, 19 nt, Artificial Sequence
  Synthetic
gagaguagauguccuauaa

SEQ ID NO: 13459 - RNA, 19 nt, Artificial Sequence
  Synthetic
ggacaggaacagagaguag

SEQ ID NO: 13460 - RNA, 19 nt, Artificial Sequence
  Synthetic
ggcagaacgugcuggguga

SEQ ID NO: 13461 - RNA, 19 nt, Artificial Sequence
  Synthetic
gaguguguccuuugagcaa

SEQ ID NO: 13462 - RNA, 19 nt, Artificial Sequence
  Synthetic
aggcgaagcuggagaaguc

SEQ ID NO: 13463 - RNA, 19 nt, Artificial Sequence
  Synthetic
gaagaaggcaggaguugau

SEQ ID NO: 13464 - RNA, 19 nt, Artificial Sequence
  Synthetic
gaauuaggaggcagccaua

SEQ ID NO: 13465 - RNA, 19 nt, Artificial Sequence
  Synthetic
uggcagaggaggagcagca

SEQ ID NO: 13466 - RNA, 19 nt, Artificial Sequence
  Synthetic
ggaaacugugggagagugu

SEQ ID NO: 13467 - RNA, 19 nt, Artificial Sequence
  Synthetic
cguucugacuugaagcuuu

SEQ ID NO: 13468 - RNA, 19 nt, Artificial Sequence
  Synthetic
acaggaaggagaagggcga

SEQ ID NO: 13469 - RNA, 19 nt, Artificial Sequence
  Synthetic
acgugaacaggaaggagaa

SEQ ID NO: 13470 - RNA, 19 nt, Artificial Sequence
  Synthetic
gccaacagcccuuaccaaa

SEQ ID NO: 13471 - RNA, 19 nt, Artificial Sequence
  Synthetic
ggguguggcugcucuggaa

SEQ ID NO: 13472 - RNA, 19 nt, Artificial Sequence
  Synthetic
ccgccaacccugagcugau

SEQ ID NO: 13473 - RNA, 19 nt, Artificial Sequence
  Synthetic
aggaggagcuggaggugcu

SEQ ID NO: 13474 - RNA, 19 nt, Artificial Sequence
  Synthetic
acagagaguagauguccua

SEQ ID NO: 13475 - RNA, 19 nt, Artificial Sequence
  Synthetic
cgggacugguagagacacu

SEQ ID NO: 13476 - RNA, 19 nt, Artificial Sequence
  Synthetic
ccccagaaguugugccuau

SEQ ID NO: 13477 - RNA, 19 nt, Artificial Sequence
  Synthetic
gaaggcaggaguugauuuu

SEQ ID NO: 13478 - RNA, 19 nt, Artificial Sequence
  Synthetic
uggagaagucacuggagca

SEQ ID NO: 13479 - RNA, 19 nt, Artificial Sequence
  Synthetic
agaagucacuggagcaucu

SEQ ID NO: 13480 - RNA, 19 nt, Artificial Sequence
  Synthetic
gcacaguuccugcagcuuu

SEQ ID NO: 13481 - RNA, 19 nt, Artificial Sequence
  Synthetic
aaacuuuggcuguugucua

SEQ ID NO: 13482 - RNA, 19 nt, Artificial Sequence
  Synthetic
ggucacugcuauucaucuu

SEQ ID NO: 13483 - RNA, 19 nt, Artificial Sequence
  Synthetic
ccgagaagcucaaggcuaa

SEQ ID NO: 13484 - RNA, 19 nt, Artificial Sequence
  Synthetic
caacuaaauuggaggcuuu

SEQ ID NO: 13485 - RNA, 19 nt, Artificial Sequence
  Synthetic
gagacaauguagcagaaua

SEQ ID NO: 13486 - RNA, 19 nt, Artificial Sequence
  Synthetic
ucaaaugagccaaagguua

SEQ ID NO: 13487 - RNA, 19 nt, Artificial Sequence
  Synthetic
ccuagaggguagaaaguuu

SEQ ID NO: 13488 - RNA, 19 nt, Artificial Sequence
  Synthetic
gccaagaaauucauugaua

SEQ ID NO: 13489 - RNA, 19 nt, Artificial Sequence
  Synthetic
cuguaaaggucacaaacua

SEQ ID NO: 13490 - RNA, 19 nt, Artificial Sequence
  Synthetic
gaaugaagugacagaggua

SEQ ID NO: 13491 - RNA, 19 nt, Artificial Sequence
  Synthetic
guuuaaagcagcuggcaau

SEQ ID NO: 13492 - RNA, 19 nt, Artificial Sequence
  Synthetic
cauaguaggcacacaguaa

SEQ ID NO: 13493 - RNA, 19 nt, Artificial Sequence
  Synthetic
aguaaacguuugugaauga

SEQ ID NO: 13494 - RNA, 19 nt, Artificial Sequence
  Synthetic
ggacauucgccuuaaggaa

SEQ ID NO: 13495 - RNA, 19 nt, Artificial Sequence
  Synthetic
caaaugagccaaagguuau

SEQ ID NO: 13496 - RNA, 19 nt, Artificial Sequence
  Synthetic
agucugagguccugaaaga

SEQ ID NO: 13497 - RNA, 19 nt, Artificial Sequence
  Synthetic
gccgaauccucgugguuua

SEQ ID NO: 13498 - RNA, 19 nt, Artificial Sequence
  Synthetic
aagcagaaucguacaguau

SEQ ID NO: 13499 - RNA, 19 nt, Artificial Sequence
  Synthetic
acuugaaucuguagacauu

SEQ ID NO: 13500 - RNA, 19 nt, Artificial Sequence
  Synthetic
gcacuaugcugcaggaauc

SEQ ID NO: 13501 - RNA, 19 nt, Artificial Sequence
  Synthetic
gauuacuacuugacgaaga

SEQ ID NO: 13502 - RNA, 19 nt, Artificial Sequence
  Synthetic
gcagaaacucagccaagaa

SEQ ID NO: 13503 - RNA, 19 nt, Artificial Sequence
  Synthetic
caaauugcuugcagauauu

SEQ ID NO: 13504 - RNA, 19 nt, Artificial Sequence
  Synthetic
ccaacagggucuggaguau

SEQ ID NO: 13505 - RNA, 19 nt, Artificial Sequence
  Synthetic
agcaggagcuacuagaaua

SEQ ID NO: 13506 - RNA, 19 nt, Artificial Sequence
  Synthetic
agccaaagguuauaaacuu

SEQ ID NO: 13507 - RNA, 19 nt, Artificial Sequence
  Synthetic
gcaaacaccuuaacuucua

SEQ ID NO: 13508 - RNA, 19 nt, Artificial Sequence
  Synthetic
gacagagggaagaugaaua

SEQ ID NO: 13509 - RNA, 19 nt, Artificial Sequence
  Synthetic
ucaaacaggcccuaaacaa

SEQ ID NO: 13510 - RNA, 19 nt, Artificial Sequence
  Synthetic
ccagguaccuuguugaaaa

SEQ ID NO: 13511 - RNA, 19 nt, Artificial Sequence
  Synthetic
ggaacaagaaucucacuau

SEQ ID NO: 13512 - RNA, 19 nt, Artificial Sequence
  Synthetic
ggucaggaguuugagacua

SEQ ID NO: 13513 - RNA, 19 nt, Artificial Sequence
  Synthetic
ucaaggagcuggaggagaa

SEQ ID NO: 13514 - RNA, 19 nt, Artificial Sequence
  Synthetic
ccucagagccagaaguuua

SEQ ID NO: 13515 - RNA, 19 nt, Artificial Sequence
  Synthetic
ggaaggagagggaugaaua

SEQ ID NO: 13516 - RNA, 19 nt, Artificial Sequence
  Synthetic
ggaguaaagaacuggcuua

SEQ ID NO: 13517 - RNA, 19 nt, Artificial Sequence
  Synthetic
gagaugagauugaggaugu

SEQ ID NO: 13518 - RNA, 19 nt, Artificial Sequence
  Synthetic
acaggaagucagugaggua

SEQ ID NO: 13519 - RNA, 19 nt, Artificial Sequence
  Synthetic
acugggaaauucuggguaa

SEQ ID NO: 13520 - RNA, 19 nt, Artificial Sequence
  Synthetic
gggaugaauauaucacaaa

SEQ ID NO: 13521 - RNA, 19 nt, Artificial Sequence
  Synthetic
ggugugagaugaagacuuu

SEQ ID NO: 13522 - RNA, 19 nt, Artificial Sequence
  Synthetic
ugacucagaucgaaagcaa

SEQ ID NO: 13523 - RNA, 19 nt, Artificial Sequence
  Synthetic
cagaaggagccaggaguaa

SEQ ID NO: 13524 - RNA, 19 nt, Artificial Sequence
  Synthetic
ccagaaggagccaggagua

SEQ ID NO: 13525 - RNA, 19 nt, Artificial Sequence
  Synthetic
ggauguaaagugucaagaa

SEQ ID NO: 13526 - RNA, 19 nt, Artificial Sequence
  Synthetic
gaugaagacuuuugugagu

SEQ ID NO: 13527 - RNA, 19 nt, Artificial Sequence
  Synthetic
aagaagagccugccagaca

SEQ ID NO: 13528 - RNA, 19 nt, Artificial Sequence
  Synthetic
cacaaaggucucugaggaa

SEQ ID NO: 13529 - RNA, 19 nt, Artificial Sequence
  Synthetic
ccagagaugaugaggaugu

SEQ ID NO: 13530 - RNA, 19 nt, Artificial Sequence
  Synthetic
ucucaggagucgacuggaa

SEQ ID NO: 13531 - RNA, 19 nt, Artificial Sequence
  Synthetic
gaaggagagggaugaauau

SEQ ID NO: 13532 - RNA, 19 nt, Artificial Sequence
  Synthetic
gaagacaggaagucaguga

SEQ ID NO: 13533 - RNA, 19 nt, Artificial Sequence
  Synthetic
ucccagagaugaugaggau

SEQ ID NO: 13534 - RNA, 19 nt, Artificial Sequence
  Synthetic
aaccagagcaggugugaga

SEQ ID NO: 13535 - RNA, 19 nt, Artificial Sequence
  Synthetic
agaaggagccaggaguaaa

SEQ ID NO: 13536 - RNA, 19 nt, Artificial Sequence
  Synthetic
cagaaaacuuggcgcauca

SEQ ID NO: 13537 - RNA, 19 nt, Artificial Sequence
  Synthetic
acucagaucgaaagcaaga

SEQ ID NO: 13538 - RNA, 19 nt, Artificial Sequence
  Synthetic
caagugagcuucuacaaga

SEQ ID NO: 13539 - RNA, 19 nt, Artificial Sequence
  Synthetic
aagaggaggagcaggcaga

SEQ ID NO: 13540 - RNA, 19 nt, Artificial Sequence
  Synthetic
aggagagggaugaauauau

SEQ ID NO: 13541 - RNA, 19 nt, Artificial Sequence
  Synthetic
gauugaggauguaaagugu

SEQ ID NO: 13542 - RNA, 19 nt, Artificial Sequence
  Synthetic
gagaugaagacuuuuguga

SEQ ID NO: 13543 - RNA, 19 nt, Artificial Sequence
  Synthetic
ccaugugggugaaaggaua

SEQ ID NO: 13544 - RNA, 19 nt, Artificial Sequence
  Synthetic
aguugaagcuggaggagga

SEQ ID NO: 13545 - RNA, 19 nt, Artificial Sequence
  Synthetic
cggacagauugaagugcua

SEQ ID NO: 13546 - RNA, 19 nt, Artificial Sequence
  Synthetic
cuguggaacucgccagaaa

SEQ ID NO: 13547 - RNA, 19 nt, Artificial Sequence
  Synthetic
gugaaaggauagacacaga

SEQ ID NO: 13548 - RNA, 19 nt, Artificial Sequence
  Synthetic
ggaagaacaacgugagugu

SEQ ID NO: 13549 - RNA, 19 nt, Artificial Sequence
  Synthetic
ggacaacgugagccggaaa

SEQ ID NO: 13550 - RNA, 19 nt, Artificial Sequence
  Synthetic
ccagaaaacugcaggagga

SEQ ID NO: 13551 - RNA, 19 nt, Artificial Sequence
  Synthetic
gugaaggagcggagagaac

SEQ ID NO: 13552 - RNA, 19 nt, Artificial Sequence
  Synthetic
gcauugugcuggaguuuga

SEQ ID NO: 13553 - RNA, 19 nt, Artificial Sequence
  Synthetic
uggaggaggacauggagua

SEQ ID NO: 13554 - RNA, 19 nt, Artificial Sequence
  Synthetic
gguacaaguugaagcugga

SEQ ID NO: 13555 - RNA, 19 nt, Artificial Sequence
  Synthetic
ccagggaggagcagagcuu

SEQ ID NO: 13556 - RNA, 19 nt, Artificial Sequence
  Synthetic
agaggaaccugcugcccaa

SEQ ID NO: 13557 - RNA, 19 nt, Artificial Sequence
  Synthetic
cagaguucccggacagauu

SEQ ID NO: 13558 - RNA, 19 nt, Artificial Sequence
  Synthetic
aggaccgauuuguggcuua

SEQ ID NO: 13559 - RNA, 19 nt, Artificial Sequence
  Synthetic
ugaccaagguggccgagau

SEQ ID NO: 13560 - RNA, 19 nt, Artificial Sequence
  Synthetic
gggaggugggcaugaacau

SEQ ID NO: 13561 - RNA, 19 nt, Artificial Sequence
  Synthetic
uggaagaagagcagaggcu

SEQ ID NO: 13562 - RNA, 19 nt, Artificial Sequence
  Synthetic
uagccgaguggcagggcaa

SEQ ID NO: 13563 - RNA, 19 nt, Artificial Sequence
  Synthetic
ccaaccggcugcugaccaa

SEQ ID NO: 13564 - RNA, 19 nt, Artificial Sequence
  Synthetic
cggaagaagaggagacugc

SEQ ID NO: 13565 - RNA, 19 nt, Artificial Sequence
  Synthetic
acagugaccauguggguga

SEQ ID NO: 13566 - RNA, 19 nt, Artificial Sequence
  Synthetic
gaucaccaggacagggaau

SEQ ID NO: 13567 - RNA, 19 nt, Artificial Sequence
  Synthetic
accucuaccugguggaaga

SEQ ID NO: 13568 - RNA, 19 nt, Artificial Sequence
  Synthetic
acuacugggaggugggcau

SEQ ID NO: 13569 - RNA, 19 nt, Artificial Sequence
  Synthetic
ugcuggaguuugagaagau

SEQ ID NO: 13570 - RNA, 19 nt, Artificial Sequence
  Synthetic
gggaaaaggcgaggggcaa

SEQ ID NO: 13571 - RNA, 19 nt, Artificial Sequence
  Synthetic
uugagaagaugaaccucua

SEQ ID NO: 13572 - RNA, 19 nt, Artificial Sequence
  Synthetic
gaggcuuucuagaggaugu

SEQ ID NO: 13573 - RNA, 19 nt, Artificial Sequence
  Synthetic
gcucaaauggagaaggaaa

SEQ ID NO: 13574 - RNA, 19 nt, Artificial Sequence
  Synthetic
ccuuagaacuguacuauaa

SEQ ID NO: 13575 - RNA, 19 nt, Artificial Sequence
  Synthetic
ggcacaaacuggaaugaaa

SEQ ID NO: 13576 - RNA, 19 nt, Artificial Sequence
  Synthetic
uggaggaaguaguaaauaa

SEQ ID NO: 13577 - RNA, 19 nt, Artificial Sequence
  Synthetic
gaaauacagugauggacaa

SEQ ID NO: 13578 - RNA, 19 nt, Artificial Sequence
  Synthetic
guuucaaagucuaucgaua

SEQ ID NO: 13579 - RNA, 19 nt, Artificial Sequence
  Synthetic
cagaaaugcuuugguaaua

SEQ ID NO: 13580 - RNA, 19 nt, Artificial Sequence
  Synthetic
ggaggaaguaguaaauaaa

SEQ ID NO: 13581 - RNA, 19 nt, Artificial Sequence
  Synthetic
cuacaaaucaugaugcuua

SEQ ID NO: 13582 - RNA, 19 nt, Artificial Sequence
  Synthetic
guacuaacguucugcacaa

SEQ ID NO: 13583 - RNA, 19 nt, Artificial Sequence
  Synthetic
gggagauccuggacaacaa

SEQ ID NO: 13584 - RNA, 19 nt, Artificial Sequence
  Synthetic
ccaggaagauuuacauuua

SEQ ID NO: 13585 - RNA, 19 nt, Artificial Sequence
  Synthetic
ggacagagagccauaagua

SEQ ID NO: 13586 - RNA, 19 nt, Artificial Sequence
  Synthetic
ggaaugugauggaauuuua

SEQ ID NO: 13587 - RNA, 19 nt, Artificial Sequence
  Synthetic
ggacaaagacggugagcug

SEQ ID NO: 13588 - RNA, 19 nt, Artificial Sequence
  Synthetic
gaacuaaacaagucccuaa

SEQ ID NO: 13589 - RNA, 19 nt, Artificial Sequence
  Synthetic
gaugggaaauuuaagacaa

SEQ ID NO: 13590 - RNA, 19 nt, Artificial Sequence
  Synthetic
gcaaauaaauacuccagau

SEQ ID NO: 13591 - RNA, 19 nt, Artificial Sequence
  Synthetic
guauaugccuggaacggua

SEQ ID NO: 13592 - RNA, 19 nt, Artificial Sequence
  Synthetic
ggacauaaucauugccgau

SEQ ID NO: 13593 - RNA, 19 nt, Artificial Sequence
  Synthetic
ccguuuaagcugaaaguga

SEQ ID NO: 13594 - RNA, 19 nt, Artificial Sequence
  Synthetic
ggaauguaaucaagaaagu

SEQ ID NO: 13595 - RNA, 19 nt, Artificial Sequence
  Synthetic
ccuuagcacugacggguua

SEQ ID NO: 13596 - RNA, 19 nt, Artificial Sequence
  Synthetic
gguaccaaaggaagaaaua

SEQ ID NO: 13597 - RNA, 19 nt, Artificial Sequence
  Synthetic
ucaaggaugugguggaaca

SEQ ID NO: 13598 - RNA, 19 nt, Artificial Sequence
  Synthetic
gaaagcaaguguuaccaaa

SEQ ID NO: 13599 - RNA, 19 nt, Artificial Sequence
  Synthetic
uggaaaacgaaaagagaau

SEQ ID NO: 13600 - RNA, 19 nt, Artificial Sequence
  Synthetic
uuauggaauuggaggucaa

SEQ ID NO: 13601 - RNA, 19 nt, Artificial Sequence
  Synthetic
ccaaauaggaugucauguu

SEQ ID NO: 13602 - RNA, 19 nt, Artificial Sequence
  Synthetic
ggaaagugcugcugauaug

SEQ ID NO: 13603 - RNA, 19 nt, Artificial Sequence
  Synthetic
caauauggcuacuggguua

SEQ ID NO: 13604 - RNA, 19 nt, Artificial Sequence
  Synthetic
gcauaaacgagguggucaa

SEQ ID NO: 13605 - RNA, 19 nt, Artificial Sequence
  Synthetic
gguuauaggauuacagaau

SEQ ID NO: 13606 - RNA, 19 nt, Artificial Sequence
  Synthetic
caguaaagguagacauaga

SEQ ID NO: 13607 - RNA, 19 nt, Artificial Sequence
  Synthetic
ccaagaaacuaaagagugu

SEQ ID NO: 13608 - RNA, 19 nt, Artificial Sequence
  Synthetic
ggacauugaagaagccaaa

SEQ ID NO: 13609 - RNA, 19 nt, Artificial Sequence
  Synthetic
ccaagaacuucaagaguca

SEQ ID NO: 13610 - RNA, 19 nt, Artificial Sequence
  Synthetic
ccuggaagaucgagagaca

SEQ ID NO: 13611 - RNA, 19 nt, Artificial Sequence
  Synthetic
cuacuggguuauaggauua

SEQ ID NO: 13612 - RNA, 19 nt, Artificial Sequence
  Synthetic
ggaucagagacaagugaaa

SEQ ID NO: 13613 - RNA, 19 nt, Artificial Sequence
  Synthetic
agcaagaaguccauaguaa

SEQ ID NO: 13614 - RNA, 19 nt, Artificial Sequence
  Synthetic
cugagaagcuggaagauga

SEQ ID NO: 13615 - RNA, 19 nt, Artificial Sequence
  Synthetic
ggucaaggaaugucaggaa

SEQ ID NO: 13616 - RNA, 19 nt, Artificial Sequence
  Synthetic
gcuaaugccuuaaugaaau

SEQ ID NO: 13617 - RNA, 19 nt, Artificial Sequence
  Synthetic
gcaauggauuucucaguaa

SEQ ID NO: 13618 - RNA, 19 nt, Artificial Sequence
  Synthetic
gggaaauauuacugggaag

SEQ ID NO: 13619 - RNA, 19 nt, Artificial Sequence
  Synthetic
acaaugaggagcagagaga

SEQ ID NO: 13620 - RNA, 19 nt, Artificial Sequence
  Synthetic
uagcaaagcaucauagauu

SEQ ID NO: 13621 - RNA, 19 nt, Artificial Sequence
  Synthetic
agugaaagcuggacauuga

SEQ ID NO: 13622 - RNA, 19 nt, Artificial Sequence
  Synthetic
gcaagaaguccauaguaau

SEQ ID NO: 13623 - RNA, 19 nt, Artificial Sequence
  Synthetic
agguagacauagagaagga

SEQ ID NO: 13624 - RNA, 19 nt, Artificial Sequence
  Synthetic
aagagaugcuuguacauua

SEQ ID NO: 13625 - RNA, 19 nt, Artificial Sequence
  Synthetic
aaguagaugugucuggaaa

SEQ ID NO: 13626 - RNA, 19 nt, Artificial Sequence
  Synthetic
ucuguaaggaggauggaaa

SEQ ID NO: 13627 - RNA, 19 nt, Artificial Sequence
  Synthetic
cagcggagguugacgggau

SEQ ID NO: 13628 - RNA, 19 nt, Artificial Sequence
  Synthetic
gcuacuggguuauaggauu

SEQ ID NO: 13629 - RNA, 19 nt, Artificial Sequence
  Synthetic
caccaaacauuccgcauaa

SEQ ID NO: 13630 - RNA, 19 nt, Artificial Sequence
  Synthetic
gcuuuugauccaaguguaa

SEQ ID NO: 13631 - RNA, 19 nt, Artificial Sequence
  Synthetic
ugagagucaucuuggacaa

SEQ ID NO: 13632 - RNA, 19 nt, Artificial Sequence
  Synthetic
gagagaaccgccuggaaga

SEQ ID NO: 13633 - RNA, 19 nt, Artificial Sequence
  Synthetic
agauaaaggaagaggagaa

SEQ ID NO: 13634 - RNA, 19 nt, Artificial Sequence
  Synthetic
gaagaggagaagaggguca

SEQ ID NO: 13635 - RNA, 19 nt, Artificial Sequence
  Synthetic
caacaucucucaaggccaa

SEQ ID NO: 13636 - RNA, 19 nt, Artificial Sequence
  Synthetic
acagaaagguggagcagcu

SEQ ID NO: 13637 - RNA, 19 nt, Artificial Sequence
  Synthetic
cacuggaugaugugagaaa

SEQ ID NO: 13638 - RNA, 19 nt, Artificial Sequence
  Synthetic
cgucgagagcacuggauga

SEQ ID NO: 13639 - RNA, 19 nt, Artificial Sequence
  Synthetic
gcaucaaaacugcgaggaa

SEQ ID NO: 13640 - RNA, 19 nt, Artificial Sequence
  Synthetic
agaagaagagugagaucca

SEQ ID NO: 13641 - RNA, 19 nt, Artificial Sequence
  Synthetic
ggcacaauaacguggagaa

SEQ ID NO: 13642 - RNA, 19 nt, Artificial Sequence
  Synthetic
cuggaugaugugagaaaca

SEQ ID NO: 13643 - RNA, 19 nt, Artificial Sequence
  Synthetic
ccaaagaggaaaagaaauc

SEQ ID NO: 13644 - RNA, 19 nt, Artificial Sequence
  Synthetic
ggaagauaaaggaagagga

SEQ ID NO: 13645 - RNA, 19 nt, Artificial Sequence
  Synthetic
ggauaugacgacugggaaa

SEQ ID NO: 13646 - RNA, 19 nt, Artificial Sequence
  Synthetic
ggaauggagagaaggguaa

SEQ ID NO: 13647 - RNA, 19 nt, Artificial Sequence
  Synthetic
aagaagaggaggaggaaga

SEQ ID NO: 13648 - RNA, 19 nt, Artificial Sequence
  Synthetic
caacgaggccugagggaau

SEQ ID NO: 13649 - RNA, 19 nt, Artificial Sequence
  Synthetic
cagaguaggugcucaauaa

SEQ ID NO: 13650 - RNA, 19 nt, Artificial Sequence
  Synthetic
aaggagagacagagacaaa

SEQ ID NO: 13651 - RNA, 19 nt, Artificial Sequence
  Synthetic
gcaagaagccuuuuaagaa

SEQ ID NO: 13652 - RNA, 19 nt, Artificial Sequence
  Synthetic
gggaagacagggaaaggaa

SEQ ID NO: 13653 - RNA, 19 nt, Artificial Sequence
  Synthetic
agaauauacugacggcaua

SEQ ID NO: 13654 - RNA, 19 nt, Artificial Sequence
  Synthetic
gcgaugaagaggaagaaga

SEQ ID NO: 13655 - RNA, 19 nt, Artificial Sequence
  Synthetic
ugagagacuuggaauauaa

SEQ ID NO: 13656 - RNA, 19 nt, Artificial Sequence
  Synthetic
gagagaagcugcacuacua

SEQ ID NO: 13657 - RNA, 19 nt, Artificial Sequence
  Synthetic
ugaagaagcuccaggacca

SEQ ID NO: 13658 - RNA, 19 nt, Artificial Sequence
  Synthetic
gggaaacggacgaagauga

SEQ ID NO: 13659 - RNA, 19 nt, Artificial Sequence
  Synthetic
ggucugaggaugaagaaga

SEQ ID NO: 13660 - RNA, 19 nt, Artificial Sequence
  Synthetic
aagaggaggaggaggaaga

SEQ ID NO: 13661 - RNA, 19 nt, Artificial Sequence
  Synthetic
guggaaaccuguugagauc

SEQ ID NO: 13662 - RNA, 19 nt, Artificial Sequence
  Synthetic
aaguggaaguggagaggga

SEQ ID NO: 13663 - RNA, 19 nt, Artificial Sequence
  Synthetic
augaggaggaagagggaga

SEQ ID NO: 13664 - RNA, 19 nt, Artificial Sequence
  Synthetic
gggagcagcaggaugcaaa

SEQ ID NO: 13665 - RNA, 19 nt, Artificial Sequence
  Synthetic
guacauuguggcugaguuu

SEQ ID NO: 13666 - RNA, 19 nt, Artificial Sequence
  Synthetic
aggaacaccugcuggaaca

SEQ ID NO: 13667 - RNA, 19 nt, Artificial Sequence
  Synthetic
aggcaaagggagaagcuga

SEQ ID NO: 13668 - RNA, 19 nt, Artificial Sequence
  Synthetic
uggcgaagcuggagcagga

SEQ ID NO: 13669 - RNA, 19 nt, Artificial Sequence
  Synthetic
ccauuuaaagccuggagua

SEQ ID NO: 13670 - RNA, 19 nt, Artificial Sequence
  Synthetic
gcucaaguggccaggaaca

SEQ ID NO: 13671 - RNA, 19 nt, Artificial Sequence
  Synthetic
agggagaagaggaggagga

SEQ ID NO: 13672 - RNA, 19 nt, Artificial Sequence
  Synthetic
ggaagaagaggaggaggaa

SEQ ID NO: 13673 - RNA, 19 nt, Artificial Sequence
  Synthetic
ccaaagacaucguggagaa

SEQ ID NO: 13674 - RNA, 19 nt, Artificial Sequence
  Synthetic
aagacaucguggagaauua

SEQ ID NO: 13675 - RNA, 19 nt, Artificial Sequence
  Synthetic
gcacuagcugugaggauaa

SEQ ID NO: 13676 - RNA, 19 nt, Artificial Sequence
  Synthetic
ucaugaaggagcugaauaa

SEQ ID NO: 13677 - RNA, 19 nt, Artificial Sequence
  Synthetic
acaaguuaacugaggacaa

SEQ ID NO: 13678 - RNA, 19 nt, Artificial Sequence
  Synthetic
ccaugugucaggugugaaa

SEQ ID NO: 13679 - RNA, 19 nt, Artificial Sequence
  Synthetic
agaccaaaccugugcuuau

SEQ ID NO: 13680 - RNA, 19 nt, Artificial Sequence
  Synthetic
gcaggaaggcuauggcuuu

SEQ ID NO: 13681 - RNA, 19 nt, Artificial Sequence
  Synthetic
ugaccaagauccagaagca

SEQ ID NO: 13682 - RNA, 19 nt, Artificial Sequence
  Synthetic
gggacaaacaugcaacauu

SEQ ID NO: 13683 - RNA, 19 nt, Artificial Sequence
  Synthetic
uagaggaugcagugaggaa

SEQ ID NO: 13684 - RNA, 19 nt, Artificial Sequence
  Synthetic
agaauuauuucaugcguga

SEQ ID NO: 13685 - RNA, 19 nt, Artificial Sequence
  Synthetic
ggacaaacaugcaacauug

SEQ ID NO: 13686 - RNA, 19 nt, Artificial Sequence
  Synthetic
aggcuauggcuuuggguca

SEQ ID NO: 13687 - RNA, 19 nt, Artificial Sequence
  Synthetic
cggcagcacuggaccauga

SEQ ID NO: 13688 - RNA, 19 nt, Artificial Sequence
  Synthetic
ggucaggagaugaucccua

SEQ ID NO: 13689 - RNA, 19 nt, Artificial Sequence
  Synthetic
gcgaucugguuaugugcaa

SEQ ID NO: 13690 - RNA, 19 nt, Artificial Sequence
  Synthetic
cguacagaagcgugugcaa

SEQ ID NO: 13691 - RNA, 19 nt, Artificial Sequence
  Synthetic
cagugaggaaccagcgcaa

SEQ ID NO: 13692 - RNA, 19 nt, Artificial Sequence
  Synthetic
ccacauggcgagaugaagu

SEQ ID NO: 13693 - RNA, 19 nt, Artificial Sequence
  Synthetic
ccuuauuguuauugaacgu

SEQ ID NO: 13694 - RNA, 19 nt, Artificial Sequence
  Synthetic
gcaacguacacaagcauga

SEQ ID NO: 13695 - RNA, 19 nt, Artificial Sequence
  Synthetic
gugugcaaguggaugucaa

SEQ ID NO: 13696 - RNA, 19 nt, Artificial Sequence
  Synthetic
aggcagacgugcaguccau

SEQ ID NO: 13697 - RNA, 19 nt, Artificial Sequence
  Synthetic
uaacugaggacaaggcaga

SEQ ID NO: 13698 - RNA, 19 nt, Artificial Sequence
  Synthetic
gugcaaccagugugaguuu

SEQ ID NO: 13699 - RNA, 19 nt, Artificial Sequence
  Synthetic
uggaggugcaggaaggcua

SEQ ID NO: 13700 - RNA, 19 nt, Artificial Sequence
  Synthetic
caacauugcagaagagcac

SEQ ID NO: 13701 - RNA, 19 nt, Artificial Sequence
  Synthetic
ggaccaugaccaagaucca

SEQ ID NO: 13702 - RNA, 19 nt, Artificial Sequence
  Synthetic
ccaagagugccgaggccuu

SEQ ID NO: 13703 - RNA, 19 nt, Artificial Sequence
  Synthetic
caacaaaggcaacgggauu

SEQ ID NO: 13704 - RNA, 19 nt, Artificial Sequence
  Synthetic
agacuaugcuggugguuua

SEQ ID NO: 13705 - RNA, 19 nt, Artificial Sequence
  Synthetic
gcaccaaggcugacggcaa

SEQ ID NO: 13706 - RNA, 19 nt, Artificial Sequence
  Synthetic
ggauuggagaggagacaaa

SEQ ID NO: 13707 - RNA, 19 nt, Artificial Sequence
  Synthetic
gagaaguggcagaaggaga

SEQ ID NO: 13708 - RNA, 19 nt, Artificial Sequence
  Synthetic
guaacuucauugagaggaa

SEQ ID NO: 13709 - RNA, 19 nt, Artificial Sequence
  Synthetic
cggacaccaugaagagaua

SEQ ID NO: 13710 - RNA, 19 nt, Artificial Sequence
  Synthetic
gagccaaggugcugcauga

SEQ ID NO: 13711 - RNA, 19 nt, Artificial Sequence
  Synthetic
ugacaguggaggaggccaa

SEQ ID NO: 13712 - RNA, 19 nt, Artificial Sequence
  Synthetic
ccauuugccuacagaauuu

SEQ ID NO: 13713 - RNA, 19 nt, Artificial Sequence
  Synthetic
gagauaaagaauucccuua

SEQ ID NO: 13714 - RNA, 19 nt, Artificial Sequence
  Synthetic
gugaacaacuacacgaaca

SEQ ID NO: 13715 - RNA, 19 nt, Artificial Sequence
  Synthetic
agaaguggcagaaggagaa

SEQ ID NO: 13716 - RNA, 19 nt, Artificial Sequence
  Synthetic
gagaggaaccacauggaga

SEQ ID NO: 13717 - RNA, 19 nt, Artificial Sequence
  Synthetic
gcauguuccaggagcacaa

SEQ ID NO: 13718 - RNA, 19 nt, Artificial Sequence
  Synthetic
aggccauccuggagcagaa

SEQ ID NO: 13719 - RNA, 19 nt, Artificial Sequence
  Synthetic
agaggaaccacauggagaa

SEQ ID NO: 13720 - RNA, 19 nt, Artificial Sequence
  Synthetic
ccagaagaauuucaacaau

SEQ ID NO: 13721 - RNA, 19 nt, Artificial Sequence
  Synthetic
gaucauugagauugaggau

SEQ ID NO: 13722 - RNA, 19 nt, Artificial Sequence
  Synthetic
cugcauagcaucagcgacu

SEQ ID NO: 13723 - RNA, 19 nt, Artificial Sequence
  Synthetic
ccgagacgccugccagaaa

SEQ ID NO: 13724 - RNA, 19 nt, Artificial Sequence
  Synthetic
gggagcagcugcauagcau

SEQ ID NO: 13725 - RNA, 19 nt, Artificial Sequence
  Synthetic
cagaagaauuucaacaauc

SEQ ID NO: 13726 - RNA, 19 nt, Artificial Sequence
  Synthetic
ggaagggugcucaaggauu

SEQ ID NO: 13727 - RNA, 19 nt, Artificial Sequence
  Synthetic
gcucuugccuucuaagcua

SEQ ID NO: 13728 - RNA, 19 nt, Artificial Sequence
  Synthetic
gccaagaagccacccguua

SEQ ID NO: 13729 - RNA, 19 nt, Artificial Sequence
  Synthetic
gagaaggaccgcaucaaga

SEQ ID NO: 13730 - RNA, 19 nt, Artificial Sequence
  Synthetic
ccaccaaugagaaggccau

SEQ ID NO: 13731 - RNA, 19 nt, Artificial Sequence
  Synthetic
gagaccacccagaagaauu

SEQ ID NO: 13732 - RNA, 19 nt, Artificial Sequence
  Synthetic
cugcugagauaaagaauuc

SEQ ID NO: 13733 - RNA, 19 nt, Artificial Sequence
  Synthetic
ggacaccaauggagacaua

SEQ ID NO: 13734 - RNA, 19 nt, Artificial Sequence
  Synthetic
gugaacaacaagaaugaaa

SEQ ID NO: 13735 - RNA, 19 nt, Artificial Sequence
  Synthetic
gcaagacgauggaguuuua

SEQ ID NO: 13736 - RNA, 19 nt, Artificial Sequence
  Synthetic
gcccagagguccagccaau

SEQ ID NO: 13737 - RNA, 19 nt, Artificial Sequence
  Synthetic
gagacauaauuguggcaga

SEQ ID NO: 13738 - RNA, 19 nt, Artificial Sequence
  Synthetic
gcggcaaacgaaaggacaa

SEQ ID NO: 13739 - RNA, 19 nt, Artificial Sequence
  Synthetic
ccacaagaauggcacauau

SEQ ID NO: 13740 - RNA, 19 nt, Artificial Sequence
  Synthetic
gcacaggcggcaaacgaaa

SEQ ID NO: 13741 - RNA, 19 nt, Artificial Sequence
  Synthetic
gcacauaugagcuagugua

SEQ ID NO: 13742 - RNA, 19 nt, Artificial Sequence
  Synthetic
agggcaaguucaagaccaa

SEQ ID NO: 13743 - RNA, 19 nt, Artificial Sequence
  Synthetic
acauaauuguggcagacua

SEQ ID NO: 13744 - RNA, 19 nt, Artificial Sequence
  Synthetic
ggacaacccaauugaggau

SEQ ID NO: 13745 - RNA, 19 nt, Artificial Sequence
  Synthetic
guacagcacaggcggcaaa

SEQ ID NO: 13746 - RNA, 19 nt, Artificial Sequence
  Synthetic
caacacaucugcagaacca

SEQ ID NO: 13747 - RNA, 19 nt, Artificial Sequence
  Synthetic
gaaacaucauuguggcuga

SEQ ID NO: 13748 - RNA, 19 nt, Artificial Sequence
  Synthetic
ccaaugagggccaguucaa

SEQ ID NO: 13749 - RNA, 19 nt, Artificial Sequence
  Synthetic
cgauggaguuuuacuguga

SEQ ID NO: 13750 - RNA, 19 nt, Artificial Sequence
  Synthetic
caagaaugaaguuguagua

SEQ ID NO: 13751 - RNA, 19 nt, Artificial Sequence
  Synthetic
gggaugugguggagcagca

SEQ ID NO: 13752 - RNA, 19 nt, Artificial Sequence
  Synthetic
cauaauuguggcagacuau

SEQ ID NO: 13753 - RNA, 19 nt, Artificial Sequence
  Synthetic
gcccagagccugacgcuau

SEQ ID NO: 13754 - RNA, 19 nt, Artificial Sequence
  Synthetic
agaaugaaguuguaguaac

SEQ ID NO: 13755 - RNA, 19 nt, Artificial Sequence
  Synthetic
gaauggcacauaugagcua

SEQ ID NO: 13756 - RNA, 19 nt, Artificial Sequence
  Synthetic
uggaagggagaaaggugaa

SEQ ID NO: 13757 - RNA, 19 nt, Artificial Sequence
  Synthetic
uugcaaagccagcuggaca

SEQ ID NO: 13758 - RNA, 19 nt, Artificial Sequence
  Synthetic
cugugaacaacaagaauga

SEQ ID NO: 13759 - RNA, 19 nt, Artificial Sequence
  Synthetic
guggaagggagaaagguga

SEQ ID NO: 13760 - RNA, 19 nt, Artificial Sequence
  Synthetic
gcaucugccuggaucggua

SEQ ID NO: 13761 - RNA, 19 nt, Artificial Sequence
  Synthetic
ccauaaccauucagagaag

SEQ ID NO: 13762 - RNA, 19 nt, Artificial Sequence
  Synthetic
ccguagaccggaauggaca

SEQ ID NO: 13763 - RNA, 19 nt, Artificial Sequence
  Synthetic
gugcagaagugaagaguuu

SEQ ID NO: 13764 - RNA, 19 nt, Artificial Sequence
  Synthetic
gaacaaacugcaagaggaa

SEQ ID NO: 13765 - RNA, 19 nt, Artificial Sequence
  Synthetic
gccaagagguagcaagaaa

SEQ ID NO: 13766 - RNA, 19 nt, Artificial Sequence
  Synthetic
gaagagaguuggagaagga

SEQ ID NO: 13767 - RNA, 19 nt, Artificial Sequence
  Synthetic
ggugaagagaguuggagaa

SEQ ID NO: 13768 - RNA, 19 nt, Artificial Sequence
  Synthetic
cgaagaagcugcccagaau

SEQ ID NO: 13769 - RNA, 19 nt, Artificial Sequence
  Synthetic
cagcaagggaaauuaauua

SEQ ID NO: 13770 - RNA, 19 nt, Artificial Sequence
  Synthetic
agguagaacaugagaagca

SEQ ID NO: 13771 - RNA, 19 nt, Artificial Sequence
  Synthetic
acuccaggcugauaggaaa

SEQ ID NO: 13772 - RNA, 19 nt, Artificial Sequence
  Synthetic
ggagaaggagacaguacaa

SEQ ID NO: 13773 - RNA, 19 nt, Artificial Sequence
  Synthetic
caguacaagugaaggcaca

SEQ ID NO: 13774 - RNA, 19 nt, Artificial Sequence
  Synthetic
ggaaucugguggagaaaau

SEQ ID NO: 13775 - RNA, 19 nt, Artificial Sequence
  Synthetic
cagcaaaaggagaaggaga

SEQ ID NO: 13776 - RNA, 19 nt, Artificial Sequence
  Synthetic
ggagacacuucuaacuuua

SEQ ID NO: 13777 - RNA, 19 nt, Artificial Sequence
  Synthetic
uagaggaggagaagaauuu

SEQ ID NO: 13778 - RNA, 19 nt, Artificial Sequence
  Synthetic
ggagaaaauccaagcucua

SEQ ID NO: 13779 - RNA, 19 nt, Artificial Sequence
  Synthetic
aagaagcugcccagaauua

SEQ ID NO: 13780 - RNA, 19 nt, Artificial Sequence
  Synthetic
gagaagaauuuccugcuau

SEQ ID NO: 13781 - RNA, 19 nt, Artificial Sequence
  Synthetic
ggagaagaauuuccugcua

SEQ ID NO: 13782 - RNA, 19 nt, Artificial Sequence
  Synthetic
caaaggauccucacagaau

SEQ ID NO: 13783 - RNA, 19 nt, Artificial Sequence
  Synthetic
ugaacaaacugcaagagga

SEQ ID NO: 13784 - RNA, 19 nt, Artificial Sequence
  Synthetic
agugaaggcacaaggugua

SEQ ID NO: 13785 - RNA, 19 nt, Artificial Sequence
  Synthetic
ugaugagauuucuggucaa

SEQ ID NO: 13786 - RNA, 19 nt, Artificial Sequence
  Synthetic
gaccacgguucuugacuua

SEQ ID NO: 13787 - RNA, 19 nt, Artificial Sequence
  Synthetic
gguagaacaugagaagcaa

SEQ ID NO: 13788 - RNA, 19 nt, Artificial Sequence
  Synthetic
gaggauccgccaagaggua

SEQ ID NO: 13789 - RNA, 19 nt, Artificial Sequence
  Synthetic
cugcaaaacuuccguaaga

SEQ ID NO: 13790 - RNA, 19 nt, Artificial Sequence
  Synthetic
cggaccagguagaacauga

SEQ ID NO: 13791 - RNA, 19 nt, Artificial Sequence
  Synthetic
ccguaagaagagacgcaau

SEQ ID NO: 13792 - RNA, 19 nt, Artificial Sequence
  Synthetic
cuagaggaggagaagaauu

SEQ ID NO: 13793 - RNA, 19 nt, Artificial Sequence
  Synthetic
gcaaacaaaugcugauaua

SEQ ID NO: 13794 - RNA, 19 nt, Artificial Sequence
  Synthetic
gcaucaagaucuacagcua

SEQ ID NO: 13795 - RNA, 19 nt, Artificial Sequence
  Synthetic
gcauauauggguuggaauu

SEQ ID NO: 13796 - RNA, 19 nt, Artificial Sequence
  Synthetic
gaaauuugcccuuguauua

SEQ ID NO: 13797 - RNA, 19 nt, Artificial Sequence
  Synthetic
cagucaaggugaaguacua

SEQ ID NO: 13798 - RNA, 19 nt, Artificial Sequence
  Synthetic
ggaaauugcuugccuuuua

SEQ ID NO: 13799 - RNA, 19 nt, Artificial Sequence
  Synthetic
ggacaguuaacguggaaga

SEQ ID NO: 13800 - RNA, 19 nt, Artificial Sequence
  Synthetic
gaucagggguggucaaaua

SEQ ID NO: 13801 - RNA, 19 nt, Artificial Sequence
  Synthetic
guggagagguggacacauu

SEQ ID NO: 13802 - RNA, 19 nt, Artificial Sequence
  Synthetic
ugacaguagucgcaaggaa

SEQ ID NO: 13803 - RNA, 19 nt, Artificial Sequence
  Synthetic
gagaauugcagaugugaca

SEQ ID NO: 13804 - RNA, 19 nt, Artificial Sequence
  Synthetic
ugacagugcuaaagaucau

SEQ ID NO: 13805 - RNA, 19 nt, Artificial Sequence
  Synthetic
cauaggaagcugggaauaa

SEQ ID NO: 13806 - RNA, 19 nt, Artificial Sequence
  Synthetic
ggacaugagcccggaggaa

SEQ ID NO: 13807 - RNA, 19 nt, Artificial Sequence
  Synthetic
gacaguagucgcaaggaaa

SEQ ID NO: 13808 - RNA, 19 nt, Artificial Sequence
  Synthetic
cuauuugguuucaggauuu

SEQ ID NO: 13809 - RNA, 19 nt, Artificial Sequence
  Synthetic
gggaauaagcaaacaaaug

SEQ ID NO: 13810 - RNA, 19 nt, Artificial Sequence
  Synthetic
cagcaaauuuggauagucu

SEQ ID NO: 13811 - RNA, 19 nt, Artificial Sequence
  Synthetic
cagcaagauuacccgcaua

SEQ ID NO: 13812 - RNA, 19 nt, Artificial Sequence
  Synthetic
gguguuagcugaaguuuga

SEQ ID NO: 13813 - RNA, 19 nt, Artificial Sequence
  Synthetic
gcaggcagauguagcacua

SEQ ID NO: 13814 - RNA, 19 nt, Artificial Sequence
  Synthetic
guggaaagcuuugguguuu

SEQ ID NO: 13815 - RNA, 19 nt, Artificial Sequence
  Synthetic
cuaaggaauuguacaacau

SEQ ID NO: 13816 - RNA, 19 nt, Artificial Sequence
  Synthetic
uguggaagguggaaagcuu

SEQ ID NO: 13817 - RNA, 19 nt, Artificial Sequence
  Synthetic
gcugaaguuugauuagcaa

SEQ ID NO: 13818 - RNA, 19 nt, Artificial Sequence
  Synthetic
gugacuacuuccuggccaa

SEQ ID NO: 13819 - RNA, 19 nt, Artificial Sequence
  Synthetic
ggucaaauacagcugccua

SEQ ID NO: 13820 - RNA, 19 nt, Artificial Sequence
  Synthetic
gugaaguacuagucgcuga

SEQ ID NO: 13821 - RNA, 19 nt, Artificial Sequence
  Synthetic
uguaguaaccgauguggaa

SEQ ID NO: 13822 - RNA, 19 nt, Artificial Sequence
  Synthetic
gguggaaagcuuugguguu

SEQ ID NO: 13823 - RNA, 19 nt, Artificial Sequence
  Synthetic
agauagaccuuguggauaa

SEQ ID NO: 13824 - RNA, 19 nt, Artificial Sequence
  Synthetic
ggacaaaccacauuaguaa

SEQ ID NO: 13825 - RNA, 19 nt, Artificial Sequence
  Synthetic
ccaagaaugcagacagaua

SEQ ID NO: 13826 - RNA, 19 nt, Artificial Sequence
  Synthetic
ccagcaaguugguguaaua

SEQ ID NO: 13827 - RNA, 19 nt, Artificial Sequence
  Synthetic
guguagaacaggaaauuaa

SEQ ID NO: 13828 - RNA, 19 nt, Artificial Sequence
  Synthetic
gggcaaagaauguagucaa

SEQ ID NO: 13829 - RNA, 19 nt, Artificial Sequence
  Synthetic
gaacauagguaucaguuuu

SEQ ID NO: 13830 - RNA, 19 nt, Artificial Sequence
  Synthetic
acaaguauaugcacagaaa

SEQ ID NO: 13831 - RNA, 19 nt, Artificial Sequence
  Synthetic
gagaauguuacaaaggaaa

SEQ ID NO: 13832 - RNA, 19 nt, Artificial Sequence
  Synthetic
caauaaagaugaugaccca

SEQ ID NO: 13833 - RNA, 19 nt, Artificial Sequence
  Synthetic
aggaagaggaugaugguga

SEQ ID NO: 13834 - RNA, 19 nt, Artificial Sequence
  Synthetic
aggugaaggucaagcaaga

SEQ ID NO: 13835 - RNA, 19 nt, Artificial Sequence
  Synthetic
gcaaguuccuccagggaca

SEQ ID NO: 13836 - RNA, 19 nt, Artificial Sequence
  Synthetic
acacaaagaacauagguau

SEQ ID NO: 13837 - RNA, 19 nt, Artificial Sequence
  Synthetic
agagaauguuacaaaggaa

SEQ ID NO: 13838 - RNA, 19 nt, Artificial Sequence
  Synthetic
gaagauaaacucacagaga

SEQ ID NO: 13839 - RNA, 19 nt, Artificial Sequence
  Synthetic
aggaagaacugcugagaag

SEQ ID NO: 13840 - RNA, 19 nt, Artificial Sequence
  Synthetic
ugccagaauaccagggaua

SEQ ID NO: 13841 - RNA, 19 nt, Artificial Sequence
  Synthetic
ccuaaagucagaugagaga

SEQ ID NO: 13842 - RNA, 19 nt, Artificial Sequence
  Synthetic
ggcaaagaauguagucaau

SEQ ID NO: 13843 - RNA, 19 nt, Artificial Sequence
  Synthetic
ggcaaggauuggaggagau

SEQ ID NO: 13844 - RNA, 19 nt, Artificial Sequence
  Synthetic
agaggaugauggugaggua

SEQ ID NO: 13845 - RNA, 19 nt, Artificial Sequence
  Synthetic
uguuacagcaauagagcua

SEQ ID NO: 13846 - RNA, 19 nt, Artificial Sequence
  Synthetic
aaguauaugcacagaaaca

SEQ ID NO: 13847 - RNA, 19 nt, Artificial Sequence
  Synthetic
ccucuauugccaugaauua

SEQ ID NO: 13848 - RNA, 19 nt, Artificial Sequence
  Synthetic
ugugauagauugacaugua

SEQ ID NO: 13849 - RNA, 19 nt, Artificial Sequence
  Synthetic
cugugaaacaugugauaga

SEQ ID NO: 13850 - RNA, 19 nt, Artificial Sequence
  Synthetic
ucagaaugcugccagaaua

SEQ ID NO: 13851 - RNA, 19 nt, Artificial Sequence
  Synthetic
gaggagauggcaacaauaa

SEQ ID NO: 13852 - RNA, 19 nt, Artificial Sequence
  Synthetic
cagcacuacuauacagcaa

SEQ ID NO: 13853 - RNA, 19 nt, Artificial Sequence
  Synthetic
guacaaacugagagacaaa

SEQ ID NO: 13854 - RNA, 19 nt, Artificial Sequence
  Synthetic
gaguggugcuugugaguua

SEQ ID NO: 13855 - RNA, 19 nt, Artificial Sequence
  Synthetic
gguuauaggguuacagaau

SEQ ID NO: 13856 - RNA, 19 nt, Artificial Sequence
  Synthetic
agagagagcugcaaagauu

SEQ ID NO: 13857 - RNA, 19 nt, Artificial Sequence
  Synthetic
cuacuggguuauaggguua

SEQ ID NO: 13858 - RNA, 19 nt, Artificial Sequence
  Synthetic
gcaaagauuggaagaagaa

SEQ ID NO: 13859 - RNA, 19 nt, Artificial Sequence
  Synthetic
ggaguuaggaccagaagaa

SEQ ID NO: 13860 - RNA, 19 nt, Artificial Sequence
  Synthetic
ugacaucagagaagagaaa

SEQ ID NO: 13861 - RNA, 19 nt, Artificial Sequence
  Synthetic
cuauuuggcuacuggguua

SEQ ID NO: 13862 - RNA, 19 nt, Artificial Sequence
  Synthetic
gauuuuauguccagaguau

SEQ ID NO: 13863 - RNA, 19 nt, Artificial Sequence
  Synthetic
ccaacauaguggagagacu

SEQ ID NO: 13864 - RNA, 19 nt, Artificial Sequence
  Synthetic
cugcaaauguuuagagaac

SEQ ID NO: 13865 - RNA, 19 nt, Artificial Sequence
  Synthetic
cggaagaaguauucaagga

SEQ ID NO: 13866 - RNA, 19 nt, Artificial Sequence
  Synthetic
gaaaagaagacgcuggaua

SEQ ID NO: 13867 - RNA, 19 nt, Artificial Sequence
  Synthetic
uugcagaggcugaggauga

SEQ ID NO: 13868 - RNA, 19 nt, Artificial Sequence
  Synthetic
ccaagaaacugaagacugu

SEQ ID NO: 13869 - RNA, 19 nt, Artificial Sequence
  Synthetic
agaagcaguuggugagaga

SEQ ID NO: 13870 - RNA, 19 nt, Artificial Sequence
  Synthetic
cagcagaagcaguugguga

SEQ ID NO: 13871 - RNA, 19 nt, Artificial Sequence
  Synthetic
ggaagaaguauucaaggaa

SEQ ID NO: 13872 - RNA, 19 nt, Artificial Sequence
  Synthetic
agguacaaacugagagaca

SEQ ID NO: 13873 - RNA, 19 nt, Artificial Sequence
  Synthetic
guuauaggguuacagaaua

SEQ ID NO: 13874 - RNA, 19 nt, Artificial Sequence
  Synthetic
ugaagaaggaagaggagga

SEQ ID NO: 13875 - RNA, 19 nt, Artificial Sequence
  Synthetic
ugacagaacccuugagucu

SEQ ID NO: 13876 - RNA, 19 nt, Artificial Sequence
  Synthetic
caaggaaugucaggagaaa

SEQ ID NO: 13877 - RNA, 19 nt, Artificial Sequence
  Synthetic
cugcaggacaugaguggaa

SEQ ID NO: 13878 - RNA, 19 nt, Artificial Sequence
  Synthetic
uggcuugaguuaugagaga

SEQ ID NO: 13879 - RNA, 19 nt, Artificial Sequence
  Synthetic
aaaagaagacgcuggauaa

SEQ ID NO: 13880 - RNA, 19 nt, Artificial Sequence
  Synthetic
auaaugaggagcagagaga

SEQ ID NO: 13881 - RNA, 19 nt, Artificial Sequence
  Synthetic
aggaagaggaggaagcuga

SEQ ID NO: 13882 - RNA, 19 nt, Artificial Sequence
  Synthetic
gauuuaagacuguaccuaa

SEQ ID NO: 13883 - RNA, 19 nt, Artificial Sequence
  Synthetic
caucaagaguacaggaaau

SEQ ID NO: 13884 - RNA, 19 nt, Artificial Sequence
  Synthetic
gcuaggaacuuuuguguau

SEQ ID NO: 13885 - RNA, 19 nt, Artificial Sequence
  Synthetic
ucaacaaccugguggagaa

SEQ ID NO: 13886 - RNA, 19 nt, Artificial Sequence
  Synthetic
ccugauagccgaagagaga

SEQ ID NO: 13887 - RNA, 19 nt, Artificial Sequence
  Synthetic
gaugauguccuuugaaaua

SEQ ID NO: 13888 - RNA, 19 nt, Artificial Sequence
  Synthetic
guguggagcuggaguguga

SEQ ID NO: 13889 - RNA, 19 nt, Artificial Sequence
  Synthetic
ggguaauauuccauuguau

SEQ ID NO: 13890 - RNA, 19 nt, Artificial Sequence
  Synthetic
gcacaucagugucaaggaa

SEQ ID NO: 13891 - RNA, 19 nt, Artificial Sequence
  Synthetic
aaggagaguuuguuacuua

SEQ ID NO: 13892 - RNA, 19 nt, Artificial Sequence
  Synthetic
gcaucaagaguacaggaaa

SEQ ID NO: 13893 - RNA, 19 nt, Artificial Sequence
  Synthetic
guagcuggcuugaguaauu

SEQ ID NO: 13894 - RNA, 19 nt, Artificial Sequence
  Synthetic
ccagaguacuuaaacacaa

SEQ ID NO: 13895 - RNA, 19 nt, Artificial Sequence
  Synthetic
gagcaugcacugcgggaga

SEQ ID NO: 13896 - RNA, 19 nt, Artificial Sequence
  Synthetic
cgaaugauauugagcaucu

SEQ ID NO: 13897 - RNA, 19 nt, Artificial Sequence
  Synthetic
agaaugggccuguuguaaa

SEQ ID NO: 13898 - RNA, 19 nt, Artificial Sequence
  Synthetic
cagauuugcuggaucauau

SEQ ID NO: 13899 - RNA, 19 nt, Artificial Sequence
  Synthetic
agauggagaugaaggagga

SEQ ID NO: 13900 - RNA, 19 nt, Artificial Sequence
  Synthetic
gaagagagaaggaacuuuu

SEQ ID NO: 13901 - RNA, 19 nt, Artificial Sequence
  Synthetic
uggagaagcugcugcgcga

SEQ ID NO: 13902 - RNA, 19 nt, Artificial Sequence
  Synthetic
ucuucugccucgaggacaa

SEQ ID NO: 13903 - RNA, 19 nt, Artificial Sequence
  Synthetic
uggaaaggagaguuuguua

SEQ ID NO: 13904 - RNA, 19 nt, Artificial Sequence
  Synthetic
acaucagugucaaggaaga

SEQ ID NO: 13905 - RNA, 19 nt, Artificial Sequence
  Synthetic
ggacauauguuuucauuuc

SEQ ID NO: 13906 - RNA, 19 nt, Artificial Sequence
  Synthetic
acacaggguuccagaguac

SEQ ID NO: 13907 - RNA, 19 nt, Artificial Sequence
  Synthetic
agacaaggcagaagcaacu

SEQ ID NO: 13908 - RNA, 19 nt, Artificial Sequence
  Synthetic
ggaagaacuggauggcuga

SEQ ID NO: 13909 - RNA, 19 nt, Artificial Sequence
  Synthetic
ccauggacguggcccuaaa

SEQ ID NO: 13910 - RNA, 19 nt, Artificial Sequence
  Synthetic
guacaggaaauacaguuaa

SEQ ID NO: 13911 - RNA, 19 nt, Artificial Sequence
  Synthetic
uuagauaugggaagaguuu

SEQ ID NO: 13912 - RNA, 19 nt, Artificial Sequence
  Synthetic
ggcugcagauggagaugaa

SEQ ID NO: 13913 - RNA, 19 nt, Artificial Sequence
  Synthetic
ugaaagaaacagaguguaa

SEQ ID NO: 13914 - RNA, 19 nt, Artificial Sequence
  Synthetic
ugguaaagauggacugaua

SEQ ID NO: 13915 - RNA, 19 nt, Artificial Sequence
  Synthetic
caugaaacagagagaauaa

SEQ ID NO: 13916 - RNA, 19 nt, Artificial Sequence
  Synthetic
aagcaaugccuuagcguua

SEQ ID NO: 13917 - RNA, 19 nt, Artificial Sequence
  Synthetic
acacaaaguucucagcuaa

SEQ ID NO: 13918 - RNA, 19 nt, Artificial Sequence
  Synthetic
caacauaguaucugucaua

SEQ ID NO: 13919 - RNA, 19 nt, Artificial Sequence
  Synthetic
cagcaaaauaucuggaaua

SEQ ID NO: 13920 - RNA, 19 nt, Artificial Sequence
  Synthetic
gaguagagcuggauuuaau

SEQ ID NO: 13921 - RNA, 19 nt, Artificial Sequence
  Synthetic
uagcaaauaucauggagaa

SEQ ID NO: 13922 - RNA, 19 nt, Artificial Sequence
  Synthetic
agagagggcuaaagaagaa

SEQ ID NO: 13923 - RNA, 19 nt, Artificial Sequence
  Synthetic
gaauaaacauguacuguga

SEQ ID NO: 13924 - RNA, 19 nt, Artificial Sequence
  Synthetic
ggaguugcuucuagcgaua

SEQ ID NO: 13925 - RNA, 19 nt, Artificial Sequence
  Synthetic
gggcuaaagaagaagcaau

SEQ ID NO: 13926 - RNA, 19 nt, Artificial Sequence
  Synthetic
uuucaaaccuugugcaauu

SEQ ID NO: 13927 - RNA, 19 nt, Artificial Sequence
  Synthetic
gauagaaguguguggaaca

SEQ ID NO: 13928 - RNA, 19 nt, Artificial Sequence
  Synthetic
gugauaaaggcaaaguaaa

SEQ ID NO: 13929 - RNA, 19 nt, Artificial Sequence
  Synthetic
ucaaugaggaacagagcaa

SEQ ID NO: 13930 - RNA, 19 nt, Artificial Sequence
  Synthetic
ggcuaaagaagaagcaauu

SEQ ID NO: 13931 - RNA, 19 nt, Artificial Sequence
  Synthetic
ggaaagauaucgucaagca

SEQ ID NO: 13932 - RNA, 19 nt, Artificial Sequence
  Synthetic
caaauaucauggagaacuu

SEQ ID NO: 13933 - RNA, 19 nt, Artificial Sequence
  Synthetic
ugacugugauaaaggcaaa

SEQ ID NO: 13934 - RNA, 19 nt, Artificial Sequence
  Synthetic
uguaauggagagagggcua

SEQ ID NO: 13935 - RNA, 19 nt, Artificial Sequence
  Synthetic
cuauaggcaugcagaaauu

SEQ ID NO: 13936 - RNA, 19 nt, Artificial Sequence
  Synthetic
caauagagaugaugaaaug

SEQ ID NO: 13937 - RNA, 19 nt, Artificial Sequence
  Synthetic
gagucaaauaucugaacua

SEQ ID NO: 13938 - RNA, 19 nt, Artificial Sequence
  Synthetic
gcaaguuacugcaaugaau

SEQ ID NO: 13939 - RNA, 19 nt, Artificial Sequence
  Synthetic
uggcauuacaaaaggaaaa

SEQ ID NO: 13940 - RNA, 19 nt, Artificial Sequence
  Synthetic
ugaugaaagugaagauguu

SEQ ID NO: 13941 - RNA, 19 nt, Artificial Sequence
  Synthetic
guaaagauggacugauauu

SEQ ID NO: 13942 - RNA, 19 nt, Artificial Sequence
  Synthetic
ugauguggaucuuggagaa

SEQ ID NO: 13943 - RNA, 19 nt, Artificial Sequence
  Synthetic
ggacuuugcuggagguuaa

SEQ ID NO: 13944 - RNA, 19 nt, Artificial Sequence
  Synthetic
ccacaaauaagaagaguaa

SEQ ID NO: 13945 - RNA, 19 nt, Artificial Sequence
  Synthetic
acacacagcugaagaauaa

SEQ ID NO: 13946 - RNA, 19 nt, Artificial Sequence
  Synthetic
acucagaagucaagagauu

SEQ ID NO: 13947 - RNA, 19 nt, Artificial Sequence
  Synthetic
ccaaagaggaugaagaaga

SEQ ID NO: 13948 - RNA, 19 nt, Artificial Sequence
  Synthetic
gugaauaacugaaguaaca

SEQ ID NO: 13949 - RNA, 19 nt, Artificial Sequence
  Synthetic
gaauggaacuccuggcaaa

SEQ ID NO: 13950 - RNA, 19 nt, Artificial Sequence
  Synthetic
gagaaaaugauguggaaua

SEQ ID NO: 13951 - RNA, 19 nt, Artificial Sequence
  Synthetic
guagauuagugaacagaaa

SEQ ID NO: 13952 - RNA, 19 nt, Artificial Sequence
  Synthetic
augaagaagaugaggagaa

SEQ ID NO: 13953 - RNA, 19 nt, Artificial Sequence
  Synthetic
ugaaaauaguggaagguaa

SEQ ID NO: 13954 - RNA, 19 nt, Artificial Sequence
  Synthetic
auacgaaacuccacaaaua

SEQ ID NO: 13955 - RNA, 19 nt, Artificial Sequence
  Synthetic
auguagaagcuguaagaaa

SEQ ID NO: 13956 - RNA, 19 nt, Artificial Sequence
  Synthetic
ggcagaaauuuaugagcaa

SEQ ID NO: 13957 - RNA, 19 nt, Artificial Sequence
  Synthetic
uguagaagcuguaagaaau

SEQ ID NO: 13958 - RNA, 19 nt, Artificial Sequence
  Synthetic
agacuuuaccagugaauua

SEQ ID NO: 13959 - RNA, 19 nt, Artificial Sequence
  Synthetic
gaaacuaugucuggagaaa

SEQ ID NO: 13960 - RNA, 19 nt, Artificial Sequence
  Synthetic
agggagaacucauggaaga

SEQ ID NO: 13961 - RNA, 19 nt, Artificial Sequence
  Synthetic
ggacauaccuuuaaaccuu

SEQ ID NO: 13962 - RNA, 19 nt, Artificial Sequence
  Synthetic
uggaauuagaagagggaga

SEQ ID NO: 13963 - RNA, 19 nt, Artificial Sequence
  Synthetic
gaaugaagagguagccaaa

SEQ ID NO: 13964 - RNA, 19 nt, Artificial Sequence
  Synthetic
acaaauaggcccugaagau

SEQ ID NO: 13965 - RNA, 19 nt, Artificial Sequence
  Synthetic
cauuagugccuguagauua

SEQ ID NO: 13966 - RNA, 19 nt, Artificial Sequence
  Synthetic
aaacagagcuuuuggaauc

SEQ ID NO: 13967 - RNA, 19 nt, Artificial Sequence
  Synthetic
gaugaugauugcacgguua

SEQ ID NO: 13968 - RNA, 19 nt, Artificial Sequence
  Synthetic
ggccaaagaggaugaagaa

SEQ ID NO: 13969 - RNA, 19 nt, Artificial Sequence
  Synthetic
guagacacguguaagauua

SEQ ID NO: 13970 - RNA, 19 nt, Artificial Sequence
  Synthetic
guugagaaaaggaggaaaa

SEQ ID NO: 13971 - RNA, 19 nt, Artificial Sequence
  Synthetic
agaaugaggagcaggaaga

SEQ ID NO: 13972 - RNA, 19 nt, Artificial Sequence
  Synthetic
ucgaaaagauaaagaccaa

SEQ ID NO: 13973 - RNA, 19 nt, Artificial Sequence
  Synthetic
gcgaauaacuaaauggaaa

SEQ ID NO: 13974 - RNA, 19 nt, Artificial Sequence
  Synthetic
guacagauucagagacaaa

SEQ ID NO: 13975 - RNA, 19 nt, Artificial Sequence
  Synthetic
gaucaaauugugagaggaa

SEQ ID NO: 13976 - RNA, 19 nt, Artificial Sequence
  Synthetic
gcaaugaacucaagagcca

SEQ ID NO: 13977 - RNA, 19 nt, Artificial Sequence
  Synthetic
gguuguaaguaguaaguga

SEQ ID NO: 13978 - RNA, 19 nt, Artificial Sequence
  Synthetic
agaaaugucaugugaggaa

SEQ ID NO: 13979 - RNA, 19 nt, Artificial Sequence
  Synthetic
agaaauugcugcagaaugu

SEQ ID NO: 13980 - RNA, 19 nt, Artificial Sequence
  Synthetic
agugaaggguagcagaaua

SEQ ID NO: 13981 - RNA, 19 nt, Artificial Sequence
  Synthetic
ccaagaagaugauggagga

SEQ ID NO: 13982 - RNA, 19 nt, Artificial Sequence
  Synthetic
cgaauauacuuuacaccaa

SEQ ID NO: 13983 - RNA, 19 nt, Artificial Sequence
  Synthetic
gcagaagcuccuugguuua

SEQ ID NO: 13984 - RNA, 19 nt, Artificial Sequence
  Synthetic
agguacagauucagagaca

SEQ ID NO: 13985 - RNA, 19 nt, Artificial Sequence
  Synthetic
caacaucaccucugagaau

SEQ ID NO: 13986 - RNA, 19 nt, Artificial Sequence
  Synthetic
ccacugacauguuguuuaa

SEQ ID NO: 13987 - RNA, 19 nt, Artificial Sequence
  Synthetic
gaccaauuaccuugaaaua

SEQ ID NO: 13988 - RNA, 19 nt, Artificial Sequence
  Synthetic
aagagaagguacagauuca

SEQ ID NO: 13989 - RNA, 19 nt, Artificial Sequence
  Synthetic
gcaagauaauagugaugau

SEQ ID NO: 13990 - RNA, 19 nt, Artificial Sequence
  Synthetic
gggcaaagcaagauaauag

SEQ ID NO: 13991 - RNA, 19 nt, Artificial Sequence
  Synthetic
ugacaggacuacaacuaaa

SEQ ID NO: 13992 - RNA, 19 nt, Artificial Sequence
  Synthetic
ggaaauagccugccaagga

SEQ ID NO: 13993 - RNA, 19 nt, Artificial Sequence
  Synthetic
ggaaagagaagguacagau

SEQ ID NO: 13994 - RNA, 19 nt, Artificial Sequence
  Synthetic
gaaagaaagcugcaauuau

SEQ ID NO: 13995 - RNA, 19 nt, Artificial Sequence
  Synthetic
caacauuaaugaugaccau

SEQ ID NO: 13996 - RNA, 19 nt, Artificial Sequence
  Synthetic
gcaugaagcaagagccuca

SEQ ID NO: 13997 - RNA, 19 nt, Artificial Sequence
  Synthetic
guggauacacccaggagaa

SEQ ID NO: 13998 - RNA, 19 nt, Artificial Sequence
  Synthetic
cggaugggauuuaggaguu

SEQ ID NO: 13999 - RNA, 19 nt, Artificial Sequence
  Synthetic
cgaaggaaccggaugggau

SEQ ID NO: 14000 - RNA, 19 nt, Artificial Sequence
  Synthetic
gaauauauggacuuagcaa

SEQ ID NO: 14001 - RNA, 19 nt, Artificial Sequence
  Synthetic
uccagaaagcugugacaaa

SEQ ID NO: 14002 - RNA, 19 nt, Artificial Sequence
  Synthetic
ugccagggcuacaaggaaa

SEQ ID NO: 14003 - RNA, 19 nt, Artificial Sequence
  Synthetic
gaacagugguagaaacaaa

SEQ ID NO: 14004 - RNA, 19 nt, Artificial Sequence
  Synthetic
gaacagauuccuagagauu

SEQ ID NO: 14005 - RNA, 19 nt, Artificial Sequence
  Synthetic
acacaggaguacaaggaaa

SEQ ID NO: 14006 - RNA, 19 nt, Artificial Sequence
  Synthetic
gaaaagaacuucagcaauu

SEQ ID NO: 14007 - RNA, 19 nt, Artificial Sequence
  Synthetic
acagauuccuagagauuaa

SEQ ID NO: 14008 - RNA, 19 nt, Artificial Sequence
  Synthetic
ccauagagcuggaaaagaa

SEQ ID NO: 14009 - RNA, 19 nt, Artificial Sequence
  Synthetic
cagcagaucuugagggagu

SEQ ID NO: 14010 - RNA, 19 nt, Artificial Sequence
  Synthetic
gcucaagagacuaguggaa

SEQ ID NO: 14011 - RNA, 19 nt, Artificial Sequence
  Synthetic
ggagaaguaugcugagcua

SEQ ID NO: 14012 - RNA, 19 nt, Artificial Sequence
  Synthetic
cggguaaucuucacagaaa

SEQ ID NO: 14013 - RNA, 19 nt, Artificial Sequence
  Synthetic
gaacagaagcugcaggaga

SEQ ID NO: 14014 - RNA, 19 nt, Artificial Sequence
  Synthetic
guacuuugcccuaaggaaa

SEQ ID NO: 14015 - RNA, 19 nt, Artificial Sequence
  Synthetic
ucucaugggucuagauauu

SEQ ID NO: 14016 - RNA, 19 nt, Artificial Sequence
  Synthetic
agagaaggguauuuguaua

SEQ ID NO: 14017 - RNA, 19 nt, Artificial Sequence
  Synthetic
ggaaggaaggagaggcuuu

SEQ ID NO: 14018 - RNA, 19 nt, Artificial Sequence
  Synthetic
gggaggaccuagagaggga

SEQ ID NO: 14019 - RNA, 19 nt, Artificial Sequence
  Synthetic
gguggaagagggugguaua

SEQ ID NO: 14020 - RNA, 19 nt, Artificial Sequence
  Synthetic
gagaagaaucugcaguuua

SEQ ID NO: 14021 - RNA, 19 nt, Artificial Sequence
  Synthetic
gaaaugacugagagaagaa

SEQ ID NO: 14022 - RNA, 19 nt, Artificial Sequence
  Synthetic
acaagagaaagcagaguua

SEQ ID NO: 14023 - RNA, 19 nt, Artificial Sequence
  Synthetic
gaaaucaacagaugugaaa

SEQ ID NO: 14024 - RNA, 19 nt, Artificial Sequence
  Synthetic
uggaagagauccugcaaga

SEQ ID NO: 14025 - RNA, 19 nt, Artificial Sequence
  Synthetic
gugaaaaggugaagaccau

SEQ ID NO: 14026 - RNA, 19 nt, Artificial Sequence
  Synthetic
aagaagaggaacaggacau

SEQ ID NO: 14027 - RNA, 19 nt, Artificial Sequence
  Synthetic
aggcauauuccuagacuau

SEQ ID NO: 14028 - RNA, 19 nt, Artificial Sequence
  Synthetic
gaagugggcuaaaggaaca

SEQ ID NO: 14029 - RNA, 19 nt, Artificial Sequence
  Synthetic
ggaaaggagagucagguau

SEQ ID NO: 14030 - RNA, 19 nt, Artificial Sequence
  Synthetic
aggguaagguugcgauuau

SEQ ID NO: 14031 - RNA, 19 nt, Artificial Sequence
  Synthetic
gaaaggagagucagguauu

SEQ ID NO: 14032 - RNA, 19 nt, Artificial Sequence
  Synthetic
gguauuagaggaaagagaa

SEQ ID NO: 14033 - RNA, 19 nt, Artificial Sequence
  Synthetic
aggaaaugcuaaagcgauu

SEQ ID NO: 14034 - RNA, 19 nt, Artificial Sequence
  Synthetic
gcauaguacccaauagaua

SEQ ID NO: 14035 - RNA, 19 nt, Artificial Sequence
  Synthetic
gggaggacgucaugggaau

SEQ ID NO: 14036 - RNA, 19 nt, Artificial Sequence
  Synthetic
aggauaagauaaagaguca

SEQ ID NO: 14037 - RNA, 19 nt, Artificial Sequence
  Synthetic
gaaguugagaguagagaua

SEQ ID NO: 14038 - RNA, 19 nt, Artificial Sequence
  Synthetic
aagaagaagaagagacgaa

SEQ ID NO: 14039 - RNA, 19 nt, Artificial Sequence
  Synthetic
aagaagagacgaagaagaa

SEQ ID NO: 14040 - RNA, 19 nt, Artificial Sequence
  Synthetic
agaagaagcugaaugagaa

SEQ ID NO: 14041 - RNA, 19 nt, Artificial Sequence
  Synthetic
caggaaugguggaaaggua

SEQ ID NO: 14042 - RNA, 19 nt, Artificial Sequence
  Synthetic
gaauggaagagaagacuaa

SEQ ID NO: 14043 - RNA, 19 nt, Artificial Sequence
  Synthetic
agauaaagagucagcgaau

SEQ ID NO: 14044 - RNA, 19 nt, Artificial Sequence
  Synthetic
ugaagaaagucaugcauuu

SEQ ID NO: 14045 - RNA, 19 nt, Artificial Sequence
  Synthetic
ugacaaaggcauagaaucu

SEQ ID NO: 14046 - RNA, 19 nt, Artificial Sequence
  Synthetic
cgaagaagaagcugaauga

SEQ ID NO: 14047 - RNA, 19 nt, Artificial Sequence
  Synthetic
aguggaaggauaagauaaa

SEQ ID NO: 14048 - RNA, 19 nt, Artificial Sequence
  Synthetic
gaauagugcugcaaugaau

SEQ ID NO: 14049 - RNA, 19 nt, Artificial Sequence
  Synthetic
gaagaagagacgaagaaga

SEQ ID NO: 14050 - RNA, 19 nt, Artificial Sequence
  Synthetic
guugaacgcuuguuaaaua

SEQ ID NO: 14051 - RNA, 19 nt, Artificial Sequence
  Synthetic
guggaugaauggaagagaa

SEQ ID NO: 14052 - RNA, 19 nt, Artificial Sequence
  Synthetic
aagaagaagcugaaugaga

SEQ ID NO: 14053 - RNA, 19 nt, Artificial Sequence
  Synthetic
cugcuuuuguagagagauu

SEQ ID NO: 14054 - RNA, 19 nt, Artificial Sequence
  Synthetic
gagauugaacaaagaagaa

SEQ ID NO: 14055 - RNA, 19 nt, Artificial Sequence
  Synthetic
ugaacaaagaagaagaaga

SEQ ID NO: 14056 - RNA, 19 nt, Artificial Sequence
  Synthetic
aagaagaagagacgaagaa

SEQ ID NO: 14057 - RNA, 19 nt, Artificial Sequence
  Synthetic
ugaugaaggaaaugcuaaa

SEQ ID NO: 14058 - RNA, 19 nt, Artificial Sequence
  Synthetic
aaaccuagcugaagacaca

SEQ ID NO: 14059 - RNA, 19 nt, Artificial Sequence
  Synthetic
auaaagagucagcgaauga

SEQ ID NO: 14060 - RNA, 19 nt, Artificial Sequence
  Synthetic
caguggaaggauaagauaa

SEQ ID NO: 14061 - RNA, 19 nt, Artificial Sequence
  Synthetic
ccaaguggcuguaaaccua

SEQ ID NO: 14062 - RNA, 19 nt, Artificial Sequence
  Synthetic
guagaaaguuuguaagaug

SEQ ID NO: 14063 - RNA, 19 nt, Artificial Sequence
  Synthetic
gaagaaugcuggugacuua

SEQ ID NO: 14064 - RNA, 19 nt, Artificial Sequence
  Synthetic
ccaaggaauuagacaccaa

SEQ ID NO: 14065 - RNA, 19 nt, Artificial Sequence
  Synthetic
ccacagaaauuagagguua

SEQ ID NO: 14066 - RNA, 19 nt, Artificial Sequence
  Synthetic
cagaaaggacauugcagaa

SEQ ID NO: 14067 - RNA, 19 nt, Artificial Sequence
  Synthetic
cacagaaauuagagguuau

SEQ ID NO: 14068 - RNA, 19 nt, Artificial Sequence
  Synthetic
gagaaaggagucagugaau

SEQ ID NO: 14069 - RNA, 19 nt, Artificial Sequence
  Synthetic
cagcagaagcggccagaau

SEQ ID NO: 14070 - RNA, 19 nt, Artificial Sequence
  Synthetic
ggagaaaggagucagugaa

SEQ ID NO: 14071 - RNA, 19 nt, Artificial Sequence
  Synthetic
aggcucagcaggagaagaa

SEQ ID NO: 14072 - RNA, 19 nt, Artificial Sequence
  Synthetic
gaaaggacggccaaggaau

SEQ ID NO: 14073 - RNA, 19 nt, Artificial Sequence
  Synthetic
acaccaacacacugaagaa

SEQ ID NO: 14074 - RNA, 19 nt, Artificial Sequence
  Synthetic
ggaaaggacggccaaggaa

SEQ ID NO: 14075 - RNA, 19 nt, Artificial Sequence
  Synthetic
gaaaggagucagugaauug

SEQ ID NO: 14076 - RNA, 19 nt, Artificial Sequence
  Synthetic
cuacaaggaacgacucaau

SEQ ID NO: 14077 - RNA, 19 nt, Artificial Sequence
  Synthetic
agaaaggagucagugaauu

SEQ ID NO: 14078 - RNA, 19 nt, Artificial Sequence
  Synthetic
gcucagaagccuggucauu

SEQ ID NO: 14079 - RNA, 19 nt, Artificial Sequence
  Synthetic
ggaauuagacaccaacaca

SEQ ID NO: 14080 - RNA, 19 nt, Artificial Sequence
  Synthetic
gaaaggacauugcagaacu

SEQ ID NO: 14081 - RNA, 19 nt, Artificial Sequence
  Synthetic
aaaggacggccaaggaauu

SEQ ID NO: 14082 - RNA, 19 nt, Artificial Sequence
  Synthetic
gagcagacuucuucuaugu

SEQ ID NO: 14083 - RNA, 19 nt, Artificial Sequence
  Synthetic
ucagaagccuggucauuga

SEQ ID NO: 14084 - RNA, 19 nt, Artificial Sequence
  Synthetic
ggccagaauccuugacauc

SEQ ID NO: 14085 - RNA, 19 nt, Artificial Sequence
  Synthetic
gcaguaacacagcucagaa

SEQ ID NO: 14086 - RNA, 19 nt, Artificial Sequence
  Synthetic
caugaacugaccauugaaa

SEQ ID NO: 14087 - RNA, 19 nt, Artificial Sequence
  Synthetic
aaaggacauugcagaacuu

SEQ ID NO: 14088 - RNA, 19 nt, Artificial Sequence
  Synthetic
gcaggaagcucagaaagga

SEQ ID NO: 14089 - RNA, 19 nt, Artificial Sequence
  Synthetic
uggaaaggacggccaagga

SEQ ID NO: 14090 - RNA, 19 nt, Artificial Sequence
  Synthetic
ccagaauccuugacaucuc

SEQ ID NO: 14091 - RNA, 19 nt, Artificial Sequence
  Synthetic
gcuggugacuuacugaaca

SEQ ID NO: 14092 - RNA, 19 nt, Artificial Sequence
  Synthetic
ggagagcagacuucuucua

SEQ ID NO: 14093 - RNA, 19 nt, Artificial Sequence
  Synthetic
uggaggagguugaggaaga

SEQ ID NO: 14094 - RNA, 19 nt, Artificial Sequence
  Synthetic
ggguagagcuggguaauaa

SEQ ID NO: 14095 - RNA, 19 nt, Artificial Sequence
  Synthetic
ugacagaacugaagagcca

SEQ ID NO: 14096 - RNA, 19 nt, Artificial Sequence
  Synthetic
caauaggugugaagaggua

SEQ ID NO: 14097 - RNA, 19 nt, Artificial Sequence
  Synthetic
aggaagaccuggacuacua

SEQ ID NO: 14098 - RNA, 19 nt, Artificial Sequence
  Synthetic
gggaaggcgugcuguggaa

SEQ ID NO: 14099 - RNA, 19 nt, Artificial Sequence
  Synthetic
aggaggaggucgaggagga

SEQ ID NO: 14100 - RNA, 19 nt, Artificial Sequence
  Synthetic
ggaggagagccuuggguau

SEQ ID NO: 14101 - RNA, 19 nt, Artificial Sequence
  Synthetic
aggagguggugcaggagua

SEQ ID NO: 14102 - RNA, 19 nt, Artificial Sequence
  Synthetic
ggaggacagagaugaguua

SEQ ID NO: 14103 - RNA, 19 nt, Artificial Sequence
  Synthetic
ccaauaugguccaggugau

SEQ ID NO: 14104 - RNA, 19 nt, Artificial Sequence
  Synthetic
gugcagaagaugaaagcca

SEQ ID NO: 14105 - RNA, 19 nt, Artificial Sequence
  Synthetic
aggaggaagaccuggacua

SEQ ID NO: 14106 - RNA, 19 nt, Artificial Sequence
  Synthetic
aggaggacgaggaggaaga

SEQ ID NO: 14107 - RNA, 19 nt, Artificial Sequence
  Synthetic
augaagacuacgaggguga

SEQ ID NO: 14108 - RNA, 19 nt, Artificial Sequence
  Synthetic
cugcaugggucccugauaa

SEQ ID NO: 14109 - RNA, 19 nt, Artificial Sequence
  Synthetic
gaggagagccuuggguaua

SEQ ID NO: 14110 - RNA, 19 nt, Artificial Sequence
  Synthetic
aggcagugcagaagaugaa

SEQ ID NO: 14111 - RNA, 19 nt, Artificial Sequence
  Synthetic
agaugaaagccaaggagga

SEQ ID NO: 14112 - RNA, 19 nt, Artificial Sequence
  Synthetic
aggaugaggaggacagaga

SEQ ID NO: 14113 - RNA, 19 nt, Artificial Sequence
  Synthetic
gggacauggaggaggagga

SEQ ID NO: 14114 - RNA, 19 nt, Artificial Sequence
  Synthetic
gggaggaugaggaggacga

SEQ ID NO: 14115 - RNA, 19 nt, Artificial Sequence
  Synthetic
gugaagagguacagcugca

SEQ ID NO: 14116 - RNA, 19 nt, Artificial Sequence
  Synthetic
aggaagugcuggaggaggu

SEQ ID NO: 14117 - RNA, 19 nt, Artificial Sequence
  Synthetic
aggaggaaguggaggcugu

SEQ ID NO: 14118 - RNA, 19 nt, Artificial Sequence
  Synthetic
aggaggaggaggacggaga

SEQ ID NO: 14119 - RNA, 19 nt, Artificial Sequence
  Synthetic
uagcuucacuugagagaga

SEQ ID NO: 14120 - RNA, 19 nt, Artificial Sequence
  Synthetic
aggaggaggacgaggagga

SEQ ID NO: 14121 - RNA, 19 nt, Artificial Sequence
  Synthetic
cugaagagccagaugaagu

SEQ ID NO: 14122 - RNA, 19 nt, Artificial Sequence
  Synthetic
acggagaggaggaggaagu

SEQ ID NO: 14123 - RNA, 19 nt, Artificial Sequence
  Synthetic
ugauaaugguccugggcaa

SEQ ID NO: 14124 - RNA, 19 nt, Artificial Sequence
  Synthetic
acaaggaggcaaagcgaaa

SEQ ID NO: 14125 - RNA, 19 nt, Artificial Sequence
  Synthetic
cuuacaaagaugagcggaa

SEQ ID NO: 14126 - RNA, 19 nt, Artificial Sequence
  Synthetic
gauaaugaccuaauggaau

SEQ ID NO: 14127 - RNA, 19 nt, Artificial Sequence
  Synthetic
ggaaacaaccucagacuca

SEQ ID NO: 14128 - RNA, 19 nt, Artificial Sequence
  Synthetic
aggcagaaggaaauugaaa

SEQ ID NO: 14129 - RNA, 19 nt, Artificial Sequence
  Synthetic
gggacauaaugcagcaaaa

SEQ ID NO: 14130 - RNA, 19 nt, Artificial Sequence
  Synthetic
agacauauacacacacaua

SEQ ID NO: 14131 - RNA, 19 nt, Artificial Sequence
  Synthetic
ccaugaaagugaacgagau

SEQ ID NO: 14132 - RNA, 19 nt, Artificial Sequence
  Synthetic
aggaacaggacgagaagau

SEQ ID NO: 14133 - RNA, 19 nt, Artificial Sequence
  Synthetic
ggacaaauucgggacauaa

SEQ ID NO: 14134 - RNA, 19 nt, Artificial Sequence
  Synthetic
ccgaggaacaggacgagaa

SEQ ID NO: 14135 - RNA, 19 nt, Artificial Sequence
  Synthetic
aagcugacaaggaggcaaa

SEQ ID NO: 14136 - RNA, 19 nt, Artificial Sequence
  Synthetic
guucaaagcaguccgauau

SEQ ID NO: 14137 - RNA, 19 nt, Artificial Sequence
  Synthetic
uggacaaauucgggacaua

SEQ ID NO: 14138 - RNA, 19 nt, Artificial Sequence
  Synthetic
aguucaaagcaguccgaua

SEQ ID NO: 14139 - RNA, 19 nt, Artificial Sequence
  Synthetic
cagaauacguguuuaaagu

SEQ ID NO: 14140 - RNA, 19 nt, Artificial Sequence
  Synthetic
gagaaagagaagaucauca

SEQ ID NO: 14141 - RNA, 19 nt, Artificial Sequence
  Synthetic
guuuaaaguuagagccauc

SEQ ID NO: 14142 - RNA, 19 nt, Artificial Sequence
  Synthetic
guguccaggcagaaggaaa

SEQ ID NO: 14143 - RNA, 19 nt, Artificial Sequence
  Synthetic
ccaaugaucccaacuguaa

SEQ ID NO: 14144 - RNA, 19 nt, Artificial Sequence
  Synthetic
uggaugaaguaaagucaau

SEQ ID NO: 14145 - RNA, 19 nt, Artificial Sequence
  Synthetic
guuacaaccaugaaaguga

SEQ ID NO: 14146 - RNA, 19 nt, Artificial Sequence
  Synthetic
ugauaaugaccuaauggaa

SEQ ID NO: 14147 - RNA, 19 nt, Artificial Sequence
  Synthetic
aggagaaagagaagaucau

SEQ ID NO: 14148 - RNA, 19 nt, Artificial Sequence
  Synthetic
gagauguuguccucaguua

SEQ ID NO: 14149 - RNA, 19 nt, Artificial Sequence
  Synthetic
cuagaaguguccaggcaga

SEQ ID NO: 14150 - RNA, 19 nt, Artificial Sequence
  Synthetic
gguaacaccagauggacau

SEQ ID NO: 14151 - RNA, 19 nt, Artificial Sequence
  Synthetic
ccaaggaagcccugaagga

SEQ ID NO: 14152 - RNA, 19 nt, Artificial Sequence
  Synthetic
caauaaacuacgugcccuu

SEQ ID NO: 14153 - RNA, 19 nt, Artificial Sequence
  Synthetic
ccacagaugaucaggauua

SEQ ID NO: 14154 - RNA, 19 nt, Artificial Sequence
  Synthetic
ggagaaacucuuaaagcaa

SEQ ID NO: 14155 - RNA, 19 nt, Artificial Sequence
  Synthetic
gugagaaguuggauguuua

SEQ ID NO: 14156 - RNA, 19 nt, Artificial Sequence
  Synthetic
aagaauagcacaaugguua

SEQ ID NO: 14157 - RNA, 19 nt, Artificial Sequence
  Synthetic
aggaauaccaagagauuuu

SEQ ID NO: 14158 - RNA, 19 nt, Artificial Sequence
  Synthetic
gagaaacucuuaaagcaaa

SEQ ID NO: 14159 - RNA, 19 nt, Artificial Sequence
  Synthetic
gggcacagaugaucaggaa

SEQ ID NO: 14160 - RNA, 19 nt, Artificial Sequence
  Synthetic
cgaagaggcagcugaggaa

SEQ ID NO: 14161 - RNA, 19 nt, Artificial Sequence
  Synthetic
ccagagaaguugggucaaa

SEQ ID NO: 14162 - RNA, 19 nt, Artificial Sequence
  Synthetic
gggagaaacucuuaaagca

SEQ ID NO: 14163 - RNA, 19 nt, Artificial Sequence
  Synthetic
agaguaaacacuugaaaga

SEQ ID NO: 14164 - RNA, 19 nt, Artificial Sequence
  Synthetic
gggucaaaauggaucaaaa

SEQ ID NO: 14165 - RNA, 19 nt, Artificial Sequence
  Synthetic
caaggaauaccaagagauu

SEQ ID NO: 14166 - RNA, 19 nt, Artificial Sequence
  Synthetic
gcacaaugguuaacucuga

SEQ ID NO: 14167 - RNA, 19 nt, Artificial Sequence
  Synthetic
ggucuucuccuuugggaaa

SEQ ID NO: 14168 - RNA, 19 nt, Artificial Sequence
  Synthetic
ucuuaaagcaaaugaggau

SEQ ID NO: 14169 - RNA, 19 nt, Artificial Sequence
  Synthetic
gaaagaaauguaucaggaa

SEQ ID NO: 14170 - RNA, 19 nt, Artificial Sequence
  Synthetic
ggaaaugugucauaaacca

SEQ ID NO: 14171 - RNA, 19 nt, Artificial Sequence
  Synthetic
auaaggaagaauagcacaa

SEQ ID NO: 14172 - RNA, 19 nt, Artificial Sequence
  Synthetic
agagacugaacaaggaaua

SEQ ID NO: 14173 - RNA, 19 nt, Artificial Sequence
  Synthetic
agaauagcacaaugguuaa

SEQ ID NO: 14174 - RNA, 19 nt, Artificial Sequence
  Synthetic
uaucaggaacuaauggaaa

SEQ ID NO: 14175 - RNA, 19 nt, Artificial Sequence
  Synthetic
gcacagaugaucaggaaug

SEQ ID NO: 14176 - RNA, 19 nt, Artificial Sequence
  Synthetic
ugaagaauuuagugaccau

SEQ ID NO: 14177 - RNA, 19 nt, Artificial Sequence
  Synthetic
agagaaaucuauaugagga

SEQ ID NO: 14178 - RNA, 19 nt, Artificial Sequence
  Synthetic
auuccugagcucugagaaa

SEQ ID NO: 14179 - RNA, 19 nt, Artificial Sequence
  Synthetic
auuuagagagacugaacaa

SEQ ID NO: 14180 - RNA, 19 nt, Artificial Sequence
  Synthetic
ugaaagaaauguaucagga

SEQ ID NO: 14181 - RNA, 19 nt, Artificial Sequence
  Synthetic
gagcugaauucaucugauu

SEQ ID NO: 14182 - RNA, 19 nt, Artificial Sequence
  Synthetic
gaugaucaggauuaagaaa

SEQ ID NO: 14183 - RNA, 19 nt, Artificial Sequence
  Synthetic
gaacaaugguccaggauaa

SEQ ID NO: 14184 - RNA, 19 nt, Artificial Sequence
  Synthetic
ggacauucucggagggcua

SEQ ID NO: 14185 - RNA, 19 nt, Artificial Sequence
  Synthetic
cuaaagagacugauagaau

SEQ ID NO: 14186 - RNA, 19 nt, Artificial Sequence
  Synthetic
gcucagauccacauaauaa

SEQ ID NO: 14187 - RNA, 19 nt, Artificial Sequence
  Synthetic
ccaagaggguggugguaga

SEQ ID NO: 14188 - RNA, 19 nt, Artificial Sequence
  Synthetic
gcucauaggcggcagaaga

SEQ ID NO: 14189 - RNA, 19 nt, Artificial Sequence
  Synthetic
ccuaaagauaagaaagaca

SEQ ID NO: 14190 - RNA, 19 nt, Artificial Sequence
  Synthetic
gugaggaguaugucagaaa

SEQ ID NO: 14191 - RNA, 19 nt, Artificial Sequence
  Synthetic
gauuaauaccaaagagguu

SEQ ID NO: 14192 - RNA, 19 nt, Artificial Sequence
  Synthetic
agugaaggcuuuaaccaua

SEQ ID NO: 14193 - RNA, 19 nt, Artificial Sequence
  Synthetic
gguaugggaugcaguggaa

SEQ ID NO: 14194 - RNA, 19 nt, Artificial Sequence
  Synthetic
gcagagggaaggagcaaga

SEQ ID NO: 14195 - RNA, 19 nt, Artificial Sequence
  Synthetic
ggauaacaaggaugggaca

SEQ ID NO: 14196 - RNA, 19 nt, Artificial Sequence
  Synthetic
cgacagggaaguagagaag

SEQ ID NO: 14197 - RNA, 19 nt, Artificial Sequence
  Synthetic
gcucagacuuggagauccu

SEQ ID NO: 14198 - RNA, 19 nt, Artificial Sequence
  Synthetic
guaccuaggcuguggccau

SEQ ID NO: 14199 - RNA, 19 nt, Artificial Sequence
  Synthetic
guagagaagaggugucaga

SEQ ID NO: 14200 - RNA, 19 nt, Artificial Sequence
  Synthetic
agagguugauccagccaaa

SEQ ID NO: 14201 - RNA, 19 nt, Artificial Sequence
  Synthetic
ugaagcagcuggaagacau

SEQ ID NO: 14202 - RNA, 19 nt, Artificial Sequence
  Synthetic
uaaaagacuugaaaggcua

SEQ ID NO: 14203 - RNA, 19 nt, Artificial Sequence
  Synthetic
auaacaaggaugggacaua

SEQ ID NO: 14204 - RNA, 19 nt, Artificial Sequence
  Synthetic
ugagaaaucugaaugcaca

SEQ ID NO: 14205 - RNA, 19 nt, Artificial Sequence
  Synthetic
agaacaaugguccaggaua

SEQ ID NO: 14206 - RNA, 19 nt, Artificial Sequence
  Synthetic
gugccguggcuaugaaauu

SEQ ID NO: 14207 - RNA, 19 nt, Artificial Sequence
  Synthetic
gcaccgaggagucuacuua

SEQ ID NO: 14208 - RNA, 19 nt, Artificial Sequence
  Synthetic
ggacauacuacauuuccua

SEQ ID NO: 14209 - RNA, 19 nt, Artificial Sequence
  Synthetic
ugguagaacggcucaggaa

SEQ ID NO: 14210 - RNA, 19 nt, Artificial Sequence
  Synthetic
caaacucacuagugggacu

SEQ ID NO: 14211 - RNA, 19 nt, Artificial Sequence
  Synthetic
gcaucaaagaacagcaugu

SEQ ID NO: 14212 - RNA, 19 nt, Artificial Sequence
  Synthetic
gcuaugaaauuuaugguac

SEQ ID NO: 14213 - RNA, 19 nt, Artificial Sequence
  Synthetic
gcacuaagccugagaggaa

SEQ ID NO: 14214 - RNA, 19 nt, Artificial Sequence
  Synthetic
ugacauacauccugggaaa

SEQ ID NO: 14215 - RNA, 19 nt, Artificial Sequence
  Synthetic
gggcugugcuggaggagaa

SEQ ID NO: 14216 - RNA, 19 nt, Artificial Sequence
  Synthetic
gcucaggucuggugggcua

SEQ ID NO: 14217 - RNA, 19 nt, Artificial Sequence
  Synthetic
ugacaaagagccugacaua

SEQ ID NO: 14218 - RNA, 19 nt, Artificial Sequence
  Synthetic
uggcagagggugaggauau

SEQ ID NO: 14219 - RNA, 19 nt, Artificial Sequence
  Synthetic
ggacauacccugggaggaa

SEQ ID NO: 14220 - RNA, 19 nt, Artificial Sequence
  Synthetic
ccacugggcuccugcauua

SEQ ID NO: 14221 - RNA, 19 nt, Artificial Sequence
  Synthetic
acaaagagccugacauaca

SEQ ID NO: 14222 - RNA, 19 nt, Artificial Sequence
  Synthetic
agaugaagcugcugacaga

SEQ ID NO: 14223 - RNA, 19 nt, Artificial Sequence
  Synthetic
gagcaagcuucaagaaagu

SEQ ID NO: 14224 - RNA, 19 nt, Artificial Sequence
  Synthetic
ugaagaacauggagaagga

SEQ ID NO: 14225 - RNA, 19 nt, Artificial Sequence
  Synthetic
caggaaguacuuaaggaaa

SEQ ID NO: 14226 - RNA, 19 nt, Artificial Sequence
  Synthetic
aggaaguacuuaaggaaac

SEQ ID NO: 14227 - RNA, 19 nt, Artificial Sequence
  Synthetic
ccgccaagcagcugcacaa

SEQ ID NO: 14228 - RNA, 19 nt, Artificial Sequence
  Synthetic
aggaagaggugacccacua

SEQ ID NO: 14229 - RNA, 19 nt, Artificial Sequence
  Synthetic
gagagcaagcuucaagaaa

SEQ ID NO: 14230 - RNA, 19 nt, Artificial Sequence
  Synthetic
gcccagaccacaaggaaga

SEQ ID NO: 14231 - RNA, 19 nt, Artificial Sequence
  Synthetic
cggcgaauacagugaagau

SEQ ID NO: 14232 - RNA, 19 nt, Artificial Sequence
  Synthetic
ccaggaaguacuuaaggaa

SEQ ID NO: 14233 - RNA, 19 nt, Artificial Sequence
  Synthetic
ggaaguacuuaaggaaaca

SEQ ID NO: 14234 - RNA, 19 nt, Artificial Sequence
  Synthetic
gcacuauaccguugaguuc

SEQ ID NO: 14235 - RNA, 19 nt, Artificial Sequence
  Synthetic
ucaaggacaagcugacaaa

SEQ ID NO: 14236 - RNA, 19 nt, Artificial Sequence
  Synthetic
gcgaauacagugaagaugu

SEQ ID NO: 14237 - RNA, 19 nt, Artificial Sequence
  Synthetic
guaccagcaugaagaacau

SEQ ID NO: 14238 - RNA, 19 nt, Artificial Sequence
  Synthetic
cugaagcccuccagacauu

SEQ ID NO: 14239 - RNA, 19 nt, Artificial Sequence
  Synthetic
agucaggcuuugggacaua

SEQ ID NO: 14240 - RNA, 19 nt, Artificial Sequence
  Synthetic
cccagaaggcccagcauga

SEQ ID NO: 14241 - RNA, 19 nt, Artificial Sequence
  Synthetic
aaggacaagcugacaaaga

SEQ ID NO: 14242 - RNA, 19 nt, Artificial Sequence
  Synthetic
agaacauggagaaggaacu

SEQ ID NO: 14243 - RNA, 19 nt, Artificial Sequence
  Synthetic
caucaagagugcagccgua

SEQ ID NO: 14244 - RNA, 19 nt, Artificial Sequence
  Synthetic
acugggagguggagauuau

SEQ ID NO: 14245 - RNA, 19 nt, Artificial Sequence
  Synthetic
cucaagaaguccugcauau

SEQ ID NO: 14246 - RNA, 19 nt, Artificial Sequence
  Synthetic
cccaagaccucgagaguac

SEQ ID NO: 14247 - RNA, 19 nt, Artificial Sequence
  Synthetic
gcacaguggcccucaucaa

SEQ ID NO: 14248 - RNA, 19 nt, Artificial Sequence
  Synthetic
ccaaaggugucaagagggu

SEQ ID NO: 14249 - RNA, 19 nt, Artificial Sequence
  Synthetic
cgagcugggugcuggcauu

SEQ ID NO: 14250 - RNA, 19 nt, Artificial Sequence
  Synthetic
uugccuauauuguggauuu

SEQ ID NO: 14251 - RNA, 19 nt, Artificial Sequence
  Synthetic
uagcagagcgggagagggu

SEQ ID NO: 14252 - RNA, 19 nt, Artificial Sequence
  Synthetic
ccuucuuccuggagagugu

SEQ ID NO: 14253 - RNA, 19 nt, Artificial Sequence
  Synthetic
ggauuuggacagcgacaca

SEQ ID NO: 14254 - RNA, 19 nt, Artificial Sequence
  Synthetic
gggacuauuuccucaaguu

SEQ ID NO: 14255 - RNA, 19 nt, Artificial Sequence
  Synthetic
ccucaagaaguccugcaua

SEQ ID NO: 14256 - RNA, 19 nt, Artificial Sequence
  Synthetic
ggacuauuuccucaaguuu

SEQ ID NO: 14257 - RNA, 19 nt, Artificial Sequence
  Synthetic
ccucaaguuugccuauauu

SEQ ID NO: 14258 - RNA, 19 nt, Artificial Sequence
  Synthetic
guacgggacggcaagauga

SEQ ID NO: 14259 - RNA, 19 nt, Artificial Sequence
  Synthetic
cgacacagcagacaaguuc

SEQ ID NO: 14260 - RNA, 19 nt, Artificial Sequence
  Synthetic
acaaguuccugcagcuguu

SEQ ID NO: 14261 - RNA, 19 nt, Artificial Sequence
  Synthetic
gcauauccgugcugaagag

SEQ ID NO: 14262 - RNA, 19 nt, Artificial Sequence
  Synthetic
gaaccaaaggugucaagag

SEQ ID NO: 14263 - RNA, 19 nt, Artificial Sequence
  Synthetic
ccuauauuguggauuugga

SEQ ID NO: 14264 - RNA, 19 nt, Artificial Sequence
  Synthetic
aggcugagcaguccaaagu

SEQ ID NO: 14265 - RNA, 19 nt, Artificial Sequence
  Synthetic
caagagugcagccguagca

SEQ ID NO: 14266 - RNA, 19 nt, Artificial Sequence
  Synthetic
ggaccgaggcaccuacuac

SEQ ID NO: 14267 - RNA, 19 nt, Artificial Sequence
  Synthetic
gcucagcuucaccaaauca

SEQ ID NO: 14268 - RNA, 19 nt, Artificial Sequence
  Synthetic
cagcuucuccgucugguuu

SEQ ID NO: 14269 - RNA, 19 nt, Artificial Sequence
  Synthetic
acaguggcccucaucaaga

SEQ ID NO: 14270 - RNA, 19 nt, Artificial Sequence
  Synthetic
ucaaguuugccuauauugu

SEQ ID NO: 14271 - RNA, 19 nt, Artificial Sequence
  Synthetic
gagggugagccggcuguuu

SEQ ID NO: 14272 - RNA, 19 nt, Artificial Sequence
  Synthetic
gccuucagcuccgcaagaa

SEQ ID NO: 14273 - RNA, 19 nt, Artificial Sequence
  Synthetic
agacaauacagcagagaaa

SEQ ID NO: 14274 - RNA, 19 nt, Artificial Sequence
  Synthetic
gggagaagcuguuaaagaa

SEQ ID NO: 14275 - RNA, 19 nt, Artificial Sequence
  Synthetic
ggagaagcuguuaaagaaa

SEQ ID NO: 14276 - RNA, 19 nt, Artificial Sequence
  Synthetic
agaauuaugucucgaagaa

SEQ ID NO: 14277 - RNA, 19 nt, Artificial Sequence
  Synthetic
gaggaguacuuaacagaau

SEQ ID NO: 14278 - RNA, 19 nt, Artificial Sequence
  Synthetic
ggacaaauagguucgguuu

SEQ ID NO: 14279 - RNA, 19 nt, Artificial Sequence
  Synthetic
caaagaacccagcgaaaca

SEQ ID NO: 14280 - RNA, 19 nt, Artificial Sequence
  Synthetic
acaaauagguucgguuuua

SEQ ID NO: 14281 - RNA, 19 nt, Artificial Sequence
  Synthetic
cgaaugagcuccugaccuu

SEQ ID NO: 14282 - RNA, 19 nt, Artificial Sequence
  Synthetic
gaaucagaauggcaauaua

SEQ ID NO: 14283 - RNA, 19 nt, Artificial Sequence
  Synthetic
gggacaggcucaaccaauu

SEQ ID NO: 14284 - RNA, 19 nt, Artificial Sequence
  Synthetic
agagaaaccucaaaacuaa

SEQ ID NO: 14285 - RNA, 19 nt, Artificial Sequence
  Synthetic
ggaaagggaagaaucagaa

SEQ ID NO: 14286 - RNA, 19 nt, Artificial Sequence
  Synthetic
gcauucacagggagacaaa

SEQ ID NO: 14287 - RNA, 19 nt, Artificial Sequence
  Synthetic
cgauugaagaagauggcuu

SEQ ID NO: 14288 - RNA, 19 nt, Artificial Sequence
  Synthetic
ggagauuugagaagcauuu

SEQ ID NO: 14289 - RNA, 19 nt, Artificial Sequence
  Synthetic
caguaugucccaagaccua

SEQ ID NO: 14290 - RNA, 19 nt, Artificial Sequence
  Synthetic
ugggagaagcuguuaaaga

SEQ ID NO: 14291 - RNA, 19 nt, Artificial Sequence
  Synthetic
gcugaggaacacugggaga

SEQ ID NO: 14292 - RNA, 19 nt, Artificial Sequence
  Synthetic
ugagugggcugcugaggaa

SEQ ID NO: 14293 - RNA, 19 nt, Artificial Sequence
  Synthetic
acaaugaagccaacaguca

SEQ ID NO: 14294 - RNA, 19 nt, Artificial Sequence
  Synthetic
gagaagcuguuaaagaaaa

SEQ ID NO: 14295 - RNA, 19 nt, Artificial Sequence
  Synthetic
gguuuuaugucuugaauug

SEQ ID NO: 14296 - RNA, 19 nt, Artificial Sequence
  Synthetic
uaccaaccauguagaauua

SEQ ID NO: 14297 - RNA, 19 nt, Artificial Sequence
  Synthetic
cagagaaaccucaaaacua

SEQ ID NO: 14298 - RNA, 19 nt, Artificial Sequence
  Synthetic
gcauaaagacaauacagca

SEQ ID NO: 14299 - RNA, 19 nt, Artificial Sequence
  Synthetic
gaaggcuuuuggagacaua

SEQ ID NO: 14300 - RNA, 19 nt, Artificial Sequence
  Synthetic
caaccaauucugaguggau

SEQ ID NO: 14301 - RNA, 19 nt, Artificial Sequence
  Synthetic
ggaguacuuaacagaauua

SEQ ID NO: 14302 - RNA, 19 nt, Artificial Sequence
  Synthetic
cuauauacaccaucccuaa

SEQ ID NO: 14303 - RNA, 19 nt, Artificial Sequence
  Synthetic
ccauauaccagcaguguaa

SEQ ID NO: 14304 - RNA, 19 nt, Artificial Sequence
  Synthetic
ggacaagauaccagacauu

SEQ ID NO: 14305 - RNA, 19 nt, Artificial Sequence
  Synthetic
uggagaaggaggaggaaga

SEQ ID NO: 14306 - RNA, 19 nt, Artificial Sequence
  Synthetic
aaauacggcuacuggguua

SEQ ID NO: 14307 - RNA, 19 nt, Artificial Sequence
  Synthetic
ggaggaagacauucugaaa

SEQ ID NO: 14308 - RNA, 19 nt, Artificial Sequence
  Synthetic
cugaagaguuggaagcuga

SEQ ID NO: 14309 - RNA, 19 nt, Artificial Sequence
  Synthetic
ugacuaagaagaugaagaa

SEQ ID NO: 14310 - RNA, 19 nt, Artificial Sequence
  Synthetic
ggaguuaaauguagugcuu

SEQ ID NO: 14311 - RNA, 19 nt, Artificial Sequence
  Synthetic
guauagagguuuuguaucu

SEQ ID NO: 14312 - RNA, 19 nt, Artificial Sequence
  Synthetic
ugaaaguucucaacacaaa

SEQ ID NO: 14313 - RNA, 19 nt, Artificial Sequence
  Synthetic
cugaagguguauugaguga

SEQ ID NO: 14314 - RNA, 19 nt, Artificial Sequence
  Synthetic
cuauuaggcucauguuuua

SEQ ID NO: 14315 - RNA, 19 nt, Artificial Sequence
  Synthetic
gcaggaagcugaagaguug

SEQ ID NO: 14316 - RNA, 19 nt, Artificial Sequence
  Synthetic
ugaagaagccagaaacuuu

SEQ ID NO: 14317 - RNA, 19 nt, Artificial Sequence
  Synthetic
uggacugggaggagagcaa

SEQ ID NO: 14318 - RNA, 19 nt, Artificial Sequence
  Synthetic
gguuauuacgcaauguaua

SEQ ID NO: 14319 - RNA, 19 nt, Artificial Sequence
  Synthetic
uagccaacauaguggagaa

SEQ ID NO: 14320 - RNA, 19 nt, Artificial Sequence
  Synthetic
uauuugaggugauggauau

SEQ ID NO: 14321 - RNA, 19 nt, Artificial Sequence
  Synthetic
ggacggagaacgugaccuu

SEQ ID NO: 14322 - RNA, 19 nt, Artificial Sequence
  Synthetic
ggguguggauggcgucaua

SEQ ID NO: 14323 - RNA, 19 nt, Artificial Sequence
  Synthetic
ccugaugcaauguguaaua

SEQ ID NO: 14324 - RNA, 19 nt, Artificial Sequence
  Synthetic
gguaaggagaagucacauu

SEQ ID NO: 14325 - RNA, 19 nt, Artificial Sequence
  Synthetic
gugacuagaguuaacaaua

SEQ ID NO: 14326 - RNA, 19 nt, Artificial Sequence
  Synthetic
aaaucaaaggagaguguuu

SEQ ID NO: 14327 - RNA, 19 nt, Artificial Sequence
  Synthetic
agaaggaggaggaagacau

SEQ ID NO: 14328 - RNA, 19 nt, Artificial Sequence
  Synthetic
gaagauaagagacaaguga

SEQ ID NO: 14329 - RNA, 19 nt, Artificial Sequence
  Synthetic
gaucugugaacaagaggaa

SEQ ID NO: 14330 - RNA, 19 nt, Artificial Sequence
  Synthetic
auaauugccuugugccaua

SEQ ID NO: 14331 - RNA, 19 nt, Artificial Sequence
  Synthetic
ucgccaaacuggugaacaa

SEQ ID NO: 14332 - RNA, 19 nt, Artificial Sequence
  Synthetic
aggccgacuuccagggcaa

SEQ ID NO: 14333 - RNA, 19 nt, Artificial Sequence
  Synthetic
gcaaugaggaccaccacaa

SEQ ID NO: 14334 - RNA, 19 nt, Artificial Sequence
  Synthetic
ccgagugugugcuggaaca

SEQ ID NO: 14335 - RNA, 19 nt, Artificial Sequence
  Synthetic
agcugaagcaggagcagaa

SEQ ID NO: 14336 - RNA, 19 nt, Artificial Sequence
  Synthetic
ccaucugccuggaggucuu

SEQ ID NO: 14337 - RNA, 19 nt, Artificial Sequence
  Synthetic
gcgagaaggaccaggagcu

SEQ ID NO: 14338 - RNA, 19 nt, Artificial Sequence
  Synthetic
cagccagccguaagggcaa

SEQ ID NO: 14339 - RNA, 19 nt, Artificial Sequence
  Synthetic
cguaagggcaagcugaaca

SEQ ID NO: 14340 - RNA, 19 nt, Artificial Sequence
  Synthetic
aagcugaccguguggaaaa

SEQ ID NO: 14341 - RNA, 19 nt, Artificial Sequence
  Synthetic
gugaacaaccggacccgaa

SEQ ID NO: 14342 - RNA, 19 nt, Artificial Sequence
  Synthetic
ucucugagcugaagcagga

SEQ ID NO: 14343 - RNA, 19 nt, Artificial Sequence
  Synthetic
agaaggaccaggagcucau

SEQ ID NO: 14344 - RNA, 19 nt, Artificial Sequence
  Synthetic
gaaaaggcucuuccggaaa

SEQ ID NO: 14345 - RNA, 19 nt, Artificial Sequence
  Synthetic
ggacccgaaucgucaauga

SEQ ID NO: 14346 - RNA, 19 nt, Artificial Sequence
  Synthetic
ucaaugagucggaugucuu

SEQ ID NO: 14347 - RNA, 19 nt, Artificial Sequence
  Synthetic
gccuggaggucuucaagga

SEQ ID NO: 14348 - RNA, 19 nt, Artificial Sequence
  Synthetic
caagcugaccguguggaaa

SEQ ID NO: 14349 - RNA, 19 nt, Artificial Sequence
  Synthetic
ugcaagggcugccugguuu

SEQ ID NO: 14350 - RNA, 19 nt, Artificial Sequence
  Synthetic
ggcucuaccugcacuauga

SEQ ID NO: 14351 - RNA, 19 nt, Artificial Sequence
  Synthetic
ugaacaaccggacccgaau

SEQ ID NO: 14352 - RNA, 19 nt, Artificial Sequence
  Synthetic
agugugugcuggaacaguu

SEQ ID NO: 14353 - RNA, 19 nt, Artificial Sequence
  Synthetic
acaaguucauccggaaguu

SEQ ID NO: 14354 - RNA, 19 nt, Artificial Sequence
  Synthetic
gaggaccaccacaaguuca

SEQ ID NO: 14355 - RNA, 19 nt, Artificial Sequence
  Synthetic
ccaccaggcugacaucaag

SEQ ID NO: 14356 - RNA, 19 nt, Artificial Sequence
  Synthetic
ucgcagcccucaucucuga

SEQ ID NO: 14357 - RNA, 19 nt, Artificial Sequence
  Synthetic
gaacaaccggacccgaauc

SEQ ID NO: 14358 - RNA, 19 nt, Artificial Sequence
  Synthetic
cggagccucucaaguugga

SEQ ID NO: 14359 - RNA, 19 nt, Artificial Sequence
  Synthetic
caaugaggaccaccacaag

SEQ ID NO: 14360 - RNA, 19 nt, Artificial Sequence
  Synthetic
caaugagucggaugucuuc

SEQ ID NO: 14361 - RNA, 19 nt, Artificial Sequence
  Synthetic
ugacaaacaugaggagaaa

SEQ ID NO: 14362 - RNA, 19 nt, Artificial Sequence
  Synthetic
ggaaggauuaugugaguuu

SEQ ID NO: 14363 - RNA, 19 nt, Artificial Sequence
  Synthetic
aagcaaagccagaauggaa

SEQ ID NO: 14364 - RNA, 19 nt, Artificial Sequence
  Synthetic
gaaaggagggcgaggacau

SEQ ID NO: 14365 - RNA, 19 nt, Artificial Sequence
  Synthetic
guuuaaggauagaagcaau

SEQ ID NO: 14366 - RNA, 19 nt, Artificial Sequence
  Synthetic
gagaagagacagaaugaca

SEQ ID NO: 14367 - RNA, 19 nt, Artificial Sequence
  Synthetic
aaacaugaggagaaacaaa

SEQ ID NO: 14368 - RNA, 19 nt, Artificial Sequence
  Synthetic
gagacagaaugacaagaua

SEQ ID NO: 14369 - RNA, 19 nt, Artificial Sequence
  Synthetic
gaaagagccaauagucaua

SEQ ID NO: 14370 - RNA, 19 nt, Artificial Sequence
  Synthetic
gagcaacaucacuuggaaa

SEQ ID NO: 14371 - RNA, 19 nt, Artificial Sequence
  Synthetic
acaaacaugaggagaaaca

SEQ ID NO: 14372 - RNA, 19 nt, Artificial Sequence
  Synthetic
augacaagauagauggaga

SEQ ID NO: 14373 - RNA, 19 nt, Artificial Sequence
  Synthetic
gaaagagaagagacagaau

SEQ ID NO: 14374 - RNA, 19 nt, Artificial Sequence
  Synthetic
gcaacucaaugaaagcaaa

SEQ ID NO: 14375 - RNA, 19 nt, Artificial Sequence
  Synthetic
caaugaaagcaaagccaga

SEQ ID NO: 14376 - RNA, 19 nt, Artificial Sequence
  Synthetic
gagacauauuacacaggua

SEQ ID NO: 14377 - RNA, 19 nt, Artificial Sequence
  Synthetic
caauauguuccaagaccua

SEQ ID NO: 14378 - RNA, 19 nt, Artificial Sequence
  Synthetic
cugaaagagccaauaguca

SEQ ID NO: 14379 - RNA, 19 nt, Artificial Sequence
  Synthetic
aagagaagagacagaauga

SEQ ID NO: 14380 - RNA, 19 nt, Artificial Sequence
  Synthetic
agaagagacagaaugacaa

SEQ ID NO: 14381 - RNA, 19 nt, Artificial Sequence
  Synthetic
aagcaugaauguuggaugu

SEQ ID NO: 14382 - RNA, 19 nt, Artificial Sequence
  Synthetic
gauuauuccuggauuguga

SEQ ID NO: 14383 - RNA, 19 nt, Artificial Sequence
  Synthetic
gaggaauguaugaggaucu

SEQ ID NO: 14384 - RNA, 19 nt, Artificial Sequence
  Synthetic
augaggaucugaagcaaau

SEQ ID NO: 14385 - RNA, 19 nt, Artificial Sequence
  Synthetic
ugaaagagccaauagucau

SEQ ID NO: 14386 - RNA, 19 nt, Artificial Sequence
  Synthetic
ggagauuugagaagcauga

SEQ ID NO: 14387 - RNA, 19 nt, Artificial Sequence
  Synthetic
gaguuuaaggauagaagca

SEQ ID NO: 14388 - RNA, 19 nt, Artificial Sequence
  Synthetic
cugcauuucuccaugaaga

SEQ ID NO: 14389 - RNA, 19 nt, Artificial Sequence
  Synthetic
gaagcaaaugugccauaaa

SEQ ID NO: 14390 - RNA, 19 nt, Artificial Sequence
  Synthetic
acuuggaaaggcugcgaaa

SEQ ID NO: 14391 - RNA, 19 nt, Artificial Sequence
  Synthetic
aagaaauacuggaagcaua

SEQ ID NO: 14392 - RNA, 19 nt, Artificial Sequence
  Synthetic
gcauuaagauggcugguua

SEQ ID NO: 14393 - RNA, 19 nt, Artificial Sequence
  Synthetic
ccaacaugguccagauaau

SEQ ID NO: 14394 - RNA, 19 nt, Artificial Sequence
  Synthetic
cuaccgagaagaagaaaua

SEQ ID NO: 14395 - RNA, 19 nt, Artificial Sequence
  Synthetic
aaacaacucuggugggaau

SEQ ID NO: 14396 - RNA, 19 nt, Artificial Sequence
  Synthetic
caggaaauaaaguuggaaa

SEQ ID NO: 14397 - RNA, 19 nt, Artificial Sequence
  Synthetic
agauagagcaagaaagcau

SEQ ID NO: 14398 - RNA, 19 nt, Artificial Sequence
  Synthetic
gugcaggaguaccaggaaa

SEQ ID NO: 14399 - RNA, 19 nt, Artificial Sequence
  Synthetic
gaucagggcaugugcuuua

SEQ ID NO: 14400 - RNA, 19 nt, Artificial Sequence
  Synthetic
ggaagaagagcaagguuga

SEQ ID NO: 14401 - RNA, 19 nt, Artificial Sequence
  Synthetic
ggacgaggaggaagaagaa

SEQ ID NO: 14402 - RNA, 19 nt, Artificial Sequence
  Synthetic
gggacaacguagacuauau

SEQ ID NO: 14403 - RNA, 19 nt, Artificial Sequence
  Synthetic
gggacgaggaggaagaaga

SEQ ID NO: 14404 - RNA, 19 nt, Artificial Sequence
  Synthetic
gguauaacuaauugggaca

SEQ ID NO: 14405 - RNA, 19 nt, Artificial Sequence
  Synthetic
aggaagaucaggacuauua

SEQ ID NO: 14406 - RNA, 19 nt, Artificial Sequence
  Synthetic
aggaguaccaggaaauaaa

SEQ ID NO: 14407 - RNA, 19 nt, Artificial Sequence
  Synthetic
ggaaauaaaguuggaaaca

SEQ ID NO: 14408 - RNA, 19 nt, Artificial Sequence
  Synthetic
aagaagaagaggaagauca

SEQ ID NO: 14409 - RNA, 19 nt, Artificial Sequence
  Synthetic
gcucggugacagugguaua

SEQ ID NO: 14410 - RNA, 19 nt, Artificial Sequence
  Synthetic
guaaggaggacgaggagga

SEQ ID NO: 14411 - RNA, 19 nt, Artificial Sequence
  Synthetic
aagaggaagaucaggacua

SEQ ID NO: 14412 - RNA, 19 nt, Artificial Sequence
  Synthetic
ggacgaagaugaagagcug

SEQ ID NO: 14413 - RNA, 19 nt, Artificial Sequence
  Synthetic
ugggaauacuucagauaga

SEQ ID NO: 14414 - RNA, 19 nt, Artificial Sequence
  Synthetic
aagaaagcauucacagcaa

SEQ ID NO: 14415 - RNA, 19 nt, Artificial Sequence
  Synthetic
agaccaagaugacgaugaa

SEQ ID NO: 14416 - RNA, 19 nt, Artificial Sequence
  Synthetic
ggugggaauacuucagaua

SEQ ID NO: 14417 - RNA, 19 nt, Artificial Sequence
  Synthetic
ccacaggagguguucauua

SEQ ID NO: 14418 - RNA, 19 nt, Artificial Sequence
  Synthetic
aagcauacgaugaggacga

SEQ ID NO: 14419 - RNA, 19 nt, Artificial Sequence
  Synthetic
ccagaaggauggugggaaa

SEQ ID NO: 14420 - RNA, 19 nt, Artificial Sequence
  Synthetic
gcuccgugucuguggauaa

SEQ ID NO: 14421 - RNA, 19 nt, Artificial Sequence
  Synthetic
ugguggaccuggugggcua

SEQ ID NO: 14422 - RNA, 19 nt, Artificial Sequence
  Synthetic
gcagcagaauaguguggua

SEQ ID NO: 14423 - RNA, 19 nt, Artificial Sequence
  Synthetic
ggagggaggaugagccgaa

SEQ ID NO: 14424 - RNA, 19 nt, Artificial Sequence
  Synthetic
acguggagguguacaauau

SEQ ID NO: 14425 - RNA, 19 nt, Artificial Sequence
  Synthetic
agccgaagacugagagaca

SEQ ID NO: 14426 - RNA, 19 nt, Artificial Sequence
  Synthetic
aggaugagccgaagacuga

SEQ ID NO: 14427 - RNA, 19 nt, Artificial Sequence
  Synthetic
cguggaggcugccgaagaa

SEQ ID NO: 14428 - RNA, 19 nt, Artificial Sequence
  Synthetic
cagcagaauagugugguaa

SEQ ID NO: 14429 - RNA, 19 nt, Artificial Sequence
  Synthetic
uggccgguguggacaauaa

SEQ ID NO: 14430 - RNA, 19 nt, Artificial Sequence
  Synthetic
agaccaacuucuucgucaa

SEQ ID NO: 14431 - RNA, 19 nt, Artificial Sequence
  Synthetic
acaauaaccugguggagcu

SEQ ID NO: 14432 - RNA, 19 nt, Artificial Sequence
  Synthetic
gcgacuuccuggccuguaa

SEQ ID NO: 14433 - RNA, 19 nt, Artificial Sequence
  Synthetic
guucauuccuggaggcaag

SEQ ID NO: 14434 - RNA, 19 nt, Artificial Sequence
  Synthetic
cuguggauaagaagggcua

SEQ ID NO: 14435 - RNA, 19 nt, Artificial Sequence
  Synthetic
gcggaugccuggagacaag

SEQ ID NO: 14436 - RNA, 19 nt, Artificial Sequence
  Synthetic
ucaacaagguggugauccu

SEQ ID NO: 14437 - RNA, 19 nt, Artificial Sequence
  Synthetic
gaagaagcugcucgggaga

SEQ ID NO: 14438 - RNA, 19 nt, Artificial Sequence
  Synthetic
ggacaagaacugccaccuu

SEQ ID NO: 14439 - RNA, 19 nt, Artificial Sequence
  Synthetic
ggucggacuggcagcagaa

SEQ ID NO: 14440 - RNA, 19 nt, Artificial Sequence
  Synthetic
agacccaacaagaagaaaa

SEQ ID NO: 14441 - RNA, 19 nt, Artificial Sequence
  Synthetic
gcagaaccgggcacugaaa

SEQ ID NO: 14442 - RNA, 19 nt, Artificial Sequence
  Synthetic
gagcagaaccgggcacuga

SEQ ID NO: 14443 - RNA, 19 nt, Artificial Sequence
  Synthetic
ccgugucuguggauaagaa

SEQ ID NO: 14444 - RNA, 19 nt, Artificial Sequence
  Synthetic
guggcagacccaacaagaa

SEQ ID NO: 14445 - RNA, 19 nt, Artificial Sequence
  Synthetic
aaggcaggcucaagucaau

SEQ ID NO: 14446 - RNA, 19 nt, Artificial Sequence
  Synthetic
ccagacaacccgagaagag

SEQ ID NO: 14447 - RNA, 19 nt, Artificial Sequence
  Synthetic
gauaagaagggcuacaucu

SEQ ID NO: 14448 - RNA, 19 nt, Artificial Sequence
  Synthetic
gcgcacggcucuaucucau

SEQ ID NO: 14449 - RNA, 19 nt, Artificial Sequence
  Synthetic
ccuacaaagcugagaagua

SEQ ID NO: 14450 - RNA, 19 nt, Artificial Sequence
  Synthetic
uagaagaggcugagaauga

SEQ ID NO: 14451 - RNA, 19 nt, Artificial Sequence
  Synthetic
gcgaaauauccuagacaga

SEQ ID NO: 14452 - RNA, 19 nt, Artificial Sequence
  Synthetic
uggaacaggaagagaagaa

SEQ ID NO: 14453 - RNA, 19 nt, Artificial Sequence
  Synthetic
gcaggaaacaucuuagaaa

SEQ ID NO: 14454 - RNA, 19 nt, Artificial Sequence
  Synthetic
caggaaacaucuuagaaau

SEQ ID NO: 14455 - RNA, 19 nt, Artificial Sequence
  Synthetic
aagaagacauccuggaaga

SEQ ID NO: 14456 - RNA, 19 nt, Artificial Sequence
  Synthetic
uaaagaagcugaagaacga

SEQ ID NO: 14457 - RNA, 19 nt, Artificial Sequence
  Synthetic
gaguagcaauagaacaaua

SEQ ID NO: 14458 - RNA, 19 nt, Artificial Sequence
  Synthetic
gagaugugcucaauguaua

SEQ ID NO: 14459 - RNA, 19 nt, Artificial Sequence
  Synthetic
cuacaaagcugagaaguau

SEQ ID NO: 14460 - RNA, 19 nt, Artificial Sequence
  Synthetic
gaaagaaauuggccuguau

SEQ ID NO: 14461 - RNA, 19 nt, Artificial Sequence
  Synthetic
cagcauaaccaugaauaua

SEQ ID NO: 14462 - RNA, 19 nt, Artificial Sequence
  Synthetic
gaauuauagaagaggcuga

SEQ ID NO: 14463 - RNA, 19 nt, Artificial Sequence
  Synthetic
ugauuggguuacagcauaa

SEQ ID NO: 14464 - RNA, 19 nt, Artificial Sequence
  Synthetic
uguauaggauugagcucua

SEQ ID NO: 14465 - RNA, 19 nt, Artificial Sequence
  Synthetic
ggauccagacagaguuuaa

SEQ ID NO: 14466 - RNA, 19 nt, Artificial Sequence
  Synthetic
acaccaaauggcagggaau

SEQ ID NO: 14467 - RNA, 19 nt, Artificial Sequence
  Synthetic
aguuuaaucagcugcgaaa

SEQ ID NO: 14468 - RNA, 19 nt, Artificial Sequence
  Synthetic
gggagguagauguggccaa

SEQ ID NO: 14469 - RNA, 19 nt, Artificial Sequence
  Synthetic
gggaucaaauuuaggaagu

SEQ ID NO: 14470 - RNA, 19 nt, Artificial Sequence
  Synthetic
gcacuuaaaggaagaggau

SEQ ID NO: 14471 - RNA, 19 nt, Artificial Sequence
  Synthetic
cagaguggauacuggguga

SEQ ID NO: 14472 - RNA, 19 nt, Artificial Sequence
  Synthetic
gaaauauccuagacagagu

SEQ ID NO: 14473 - RNA, 19 nt, Artificial Sequence
  Synthetic
agguagauguggccaagaa

SEQ ID NO: 14474 - RNA, 19 nt, Artificial Sequence
  Synthetic
uuuaaucagcugcgaaaua

SEQ ID NO: 14475 - RNA, 19 nt, Artificial Sequence
  Synthetic
agacaguucuuucguuuua

SEQ ID NO: 14476 - RNA, 19 nt, Artificial Sequence
  Synthetic
gccauuaagcauaguauuu

SEQ ID NO: 14477 - RNA, 19 nt, Artificial Sequence
  Synthetic
uaaaggaagaggaugauuu

SEQ ID NO: 14478 - RNA, 19 nt, Artificial Sequence
  Synthetic
aggaguaccaggagaaguu

SEQ ID NO: 14479 - RNA, 19 nt, Artificial Sequence
  Synthetic
cugcagagaaacauggaua

SEQ ID NO: 14480 - RNA, 19 nt, Artificial Sequence
  Synthetic
agagaaacauggauauuca

SEQ ID NO: 14481 - RNA, 19 nt, Artificial Sequence
  Synthetic
gaaagauaauagaguccau

SEQ ID NO: 14482 - RNA, 19 nt, Artificial Sequence
  Synthetic
gcagagaaacauggauauu

SEQ ID NO: 14483 - RNA, 19 nt, Artificial Sequence
  Synthetic
uauauaggguguccacaua

SEQ ID NO: 14484 - RNA, 19 nt, Artificial Sequence
  Synthetic
gguguuggagugugugcua

SEQ ID NO: 14485 - RNA, 19 nt, Artificial Sequence
  Synthetic
cugcggaagcaucuuguaa

SEQ ID NO: 14486 - RNA, 19 nt, Artificial Sequence
  Synthetic
gaagcaucuuguaauggaa

SEQ ID NO: 14487 - RNA, 19 nt, Artificial Sequence
  Synthetic
ccgcagaaucgauuucaga

SEQ ID NO: 14488 - RNA, 19 nt, Artificial Sequence
  Synthetic
gcggaagcaucuuguaaug

SEQ ID NO: 14489 - RNA, 19 nt, Artificial Sequence
  Synthetic
ggaagcaucuuguaaugga

SEQ ID NO: 14490 - RNA, 19 nt, Artificial Sequence
  Synthetic
gaaucaggacgcucaguca

SEQ ID NO: 14491 - RNA, 19 nt, Artificial Sequence
  Synthetic
ucacucugauauuacguaa

SEQ ID NO: 14492 - RNA, 19 nt, Artificial Sequence
  Synthetic
gcgaacccuucaagcucua

SEQ ID NO: 14493 - RNA, 19 nt, Artificial Sequence
  Synthetic
gagaaacauggauauucaa

SEQ ID NO: 14494 - RNA, 19 nt, Artificial Sequence
  Synthetic
gauauuacguaacauacca

SEQ ID NO: 14495 - RNA, 19 nt, Artificial Sequence
  Synthetic
acucugauauuacguaaca

SEQ ID NO: 14496 - RNA, 19 nt, Artificial Sequence
  Synthetic
uggagugugugcuauggaa

SEQ ID NO: 14497 - RNA, 19 nt, Artificial Sequence
  Synthetic
uauaggguguccacauaau

SEQ ID NO: 14498 - RNA, 19 nt, Artificial Sequence
  Synthetic
gcaaaacaacuggcuuaaa

SEQ ID NO: 14499 - RNA, 19 nt, Artificial Sequence
  Synthetic
gcuauggaaccgcagaauc

SEQ ID NO: 14500 - RNA, 19 nt, Artificial Sequence
  Synthetic
uggaaccgcagaaucgauu

SEQ ID NO: 14501 - RNA, 19 nt, Artificial Sequence
  Synthetic
caaaacaacuggcuuaaac

SEQ ID NO: 14502 - RNA, 19 nt, Artificial Sequence
  Synthetic
ggaacacauuacuauuucu

SEQ ID NO: 14503 - RNA, 19 nt, Artificial Sequence
  Synthetic
cagcauggcgaacccuuca

SEQ ID NO: 14504 - RNA, 19 nt, Artificial Sequence
  Synthetic
ggaaccgcagaaucgauuu

SEQ ID NO: 14505 - RNA, 19 nt, Artificial Sequence
  Synthetic
gaggcgacgugcuccaucu

SEQ ID NO: 14506 - RNA, 19 nt, Artificial Sequence
  Synthetic
cagagaaacauggauauuc

SEQ ID NO: 14507 - RNA, 19 nt, Artificial Sequence
  Synthetic
guuagggccugcggaagca

SEQ ID NO: 14508 - RNA, 19 nt, Artificial Sequence
  Synthetic
gaaccgcagaaucgauuuc

SEQ ID NO: 14509 - RNA, 19 nt, Artificial Sequence
  Synthetic
gagaagaaccugaagcuca

SEQ ID NO: 14510 - RNA, 19 nt, Artificial Sequence
  Synthetic
ucaccaacaucguggagaa

SEQ ID NO: 14511 - RNA, 19 nt, Artificial Sequence
  Synthetic
ccaacaucguggagaaguu

SEQ ID NO: 14512 - RNA, 19 nt, Artificial Sequence
  Synthetic
ggaaugaccuuuagauugu

SEQ ID NO: 14513 - RNA, 19 nt, Artificial Sequence
  Synthetic
uguacaaacucgagucaga

SEQ ID NO: 14514 - RNA, 19 nt, Artificial Sequence
  Synthetic
gcggagaauuggaagaacu

SEQ ID NO: 14515 - RNA, 19 nt, Artificial Sequence
  Synthetic
aggagaagcagcugcggaa

SEQ ID NO: 14516 - RNA, 19 nt, Artificial Sequence
  Synthetic
ccaagaagcugcugggcuc

SEQ ID NO: 14517 - RNA, 19 nt, Artificial Sequence
  Synthetic
gagaagcagcugcggaaaa

SEQ ID NO: 14518 - RNA, 19 nt, Artificial Sequence
  Synthetic
ugaacgaaguggccaagaa

SEQ ID NO: 14519 - RNA, 19 nt, Artificial Sequence
  Synthetic
acaccaagucugugaaaau

SEQ ID NO: 14520 - RNA, 19 nt, Artificial Sequence
  Synthetic
gugaaaauccugauggaca

SEQ ID NO: 14521 - RNA, 19 nt, Artificial Sequence
  Synthetic
gauagugaccacagcaaaa

SEQ ID NO: 14522 - RNA, 19 nt, Artificial Sequence
  Synthetic
ggaaugaaauccggaagau

SEQ ID NO: 14523 - RNA, 19 nt, Artificial Sequence
  Synthetic
acgaaguggccaagaagga

SEQ ID NO: 14524 - RNA, 19 nt, Artificial Sequence
  Synthetic
cguggagauccgaaggaau

SEQ ID NO: 14525 - RNA, 19 nt, Artificial Sequence
  Synthetic
uggccaagaaggagaagca

SEQ ID NO: 14526 - RNA, 19 nt, Artificial Sequence
  Synthetic
uugauaagacggaggaugu

SEQ ID NO: 14527 - RNA, 19 nt, Artificial Sequence
  Synthetic
gccaaguucugcagcgaga

SEQ ID NO: 14528 - RNA, 19 nt, Artificial Sequence
  Synthetic
aggaaugaaauccggaaga

SEQ ID NO: 14529 - RNA, 19 nt, Artificial Sequence
  Synthetic
agaacugcuucgaggagga

SEQ ID NO: 14530 - RNA, 19 nt, Artificial Sequence
  Synthetic
agacggaggaugucagcuu

SEQ ID NO: 14531 - RNA, 19 nt, Artificial Sequence
  Synthetic
acauugaggaccagcugua

SEQ ID NO: 14532 - RNA, 19 nt, Artificial Sequence
  Synthetic
acuccaagcucuuccugaa

SEQ ID NO: 14533 - RNA, 19 nt, Artificial Sequence
  Synthetic
aggagaaagugaaccaacu

SEQ ID NO: 14534 - RNA, 19 nt, Artificial Sequence
  Synthetic
caggauuucuacagggugu

SEQ ID NO: 14535 - RNA, 19 nt, Artificial Sequence
  Synthetic
gcuucgaggaggagcucau

SEQ ID NO: 14536 - RNA, 19 nt, Artificial Sequence
  Synthetic
gaacaccaagucugugaaa

SEQ ID NO: 14537 - RNA, 19 nt, Artificial Sequence
  Synthetic
ugaaccaacugaaggagga

SEQ ID NO: 14538 - RNA, 19 nt, Artificial Sequence
  Synthetic
uggaggagaaagugaacca

SEQ ID NO: 14539 - RNA, 19 nt, Artificial Sequence
  Synthetic
ccagaaagacaaggagaaa

SEQ ID NO: 14540 - RNA, 19 nt, Artificial Sequence
  Synthetic
cagcaugguuacuacgaaa

SEQ ID NO: 14541 - RNA, 19 nt, Artificial Sequence
  Synthetic
aagcagagggugaggguga

SEQ ID NO: 14542 - RNA, 19 nt, Artificial Sequence
  Synthetic
agaaagaguacgagaaucu

SEQ ID NO: 14543 - RNA, 19 nt, Artificial Sequence
  Synthetic
acgcaaugcuacuguggua

SEQ ID NO: 14544 - RNA, 19 nt, Artificial Sequence
  Synthetic
caagaaagaguacgagaau

SEQ ID NO: 14545 - RNA, 19 nt, Artificial Sequence
  Synthetic
ggagcaagaugaagaccau

SEQ ID NO: 14546 - RNA, 19 nt, Artificial Sequence
  Synthetic
cuguuaagcccaagaccaa

SEQ ID NO: 14547 - RNA, 19 nt, Artificial Sequence
  Synthetic
gaucagauguggucagacu

SEQ ID NO: 14548 - RNA, 19 nt, Artificial Sequence
  Synthetic
gcccugagguggaggagau

SEQ ID NO: 14549 - RNA, 19 nt, Artificial Sequence
  Synthetic
ucaagaaagaguacgagaa

SEQ ID NO: 14550 - RNA, 19 nt, Artificial Sequence
  Synthetic
gagacaugggugugggaca

SEQ ID NO: 14551 - RNA, 19 nt, Artificial Sequence
  Synthetic
gggaccagccugaggugua

SEQ ID NO: 14552 - RNA, 19 nt, Artificial Sequence
  Synthetic
uggagaggauggaagauuu

SEQ ID NO: 14553 - RNA, 19 nt, Artificial Sequence
  Synthetic
cccagaaagacaaggagaa

SEQ ID NO: 14554 - RNA, 19 nt, Artificial Sequence
  Synthetic
agaaugaacuggacaaugu

SEQ ID NO: 14555 - RNA, 19 nt, Artificial Sequence
  Synthetic
uaaagaaugaacuggacaa

SEQ ID NO: 14556 - RNA, 19 nt, Artificial Sequence
  Synthetic
aagguuaagcagaggguga

SEQ ID NO: 14557 - RNA, 19 nt, Artificial Sequence
  Synthetic
cuaacgaugcugcaggaaa

SEQ ID NO: 14558 - RNA, 19 nt, Artificial Sequence
  Synthetic
gcaaagaugugguaaggac

SEQ ID NO: 14559 - RNA, 19 nt, Artificial Sequence
  Synthetic
gaacagugagucugaccaa

SEQ ID NO: 14560 - RNA, 19 nt, Artificial Sequence
  Synthetic
gggugagggugaagacagu

SEQ ID NO: 14561 - RNA, 19 nt, Artificial Sequence
  Synthetic
agcccaagaccaagguuaa

SEQ ID NO: 14562 - RNA, 19 nt, Artificial Sequence
  Synthetic
cuacgaagccggaccugua

SEQ ID NO: 14563 - RNA, 19 nt, Artificial Sequence
  Synthetic
aggccaagcuggacaccuu

SEQ ID NO: 14564 - RNA, 19 nt, Artificial Sequence
  Synthetic
ggaaaucaugagccugaaa

SEQ ID NO: 14565 - RNA, 19 nt, Artificial Sequence
  Synthetic
gagcugugcaggagagcca

SEQ ID NO: 14566 - RNA, 19 nt, Artificial Sequence
  Synthetic
guauggagaggauggaaga

SEQ ID NO: 14567 - RNA, 19 nt, Artificial Sequence
  Synthetic
ggaccagccugagguguaa

SEQ ID NO: 14568 - RNA, 19 nt, Artificial Sequence
  Synthetic
caggagagccagaugagga

SEQ ID NO: 14569 - RNA, 19 nt, Artificial Sequence
  Synthetic
gaacacagauggugcgaua

SEQ ID NO: 14570 - RNA, 19 nt, Artificial Sequence
  Synthetic
gggaaaaggaacagaguaa

SEQ ID NO: 14571 - RNA, 19 nt, Artificial Sequence
  Synthetic
agaagaaguagcagggaaa

SEQ ID NO: 14572 - RNA, 19 nt, Artificial Sequence
  Synthetic
ccacagaugaugagagcaa

SEQ ID NO: 14573 - RNA, 19 nt, Artificial Sequence
  Synthetic
gguauaaaccugugagaga

SEQ ID NO: 14574 - RNA, 19 nt, Artificial Sequence
  Synthetic
ucgcaaagguuaagaugaa

SEQ ID NO: 14575 - RNA, 19 nt, Artificial Sequence
  Synthetic
ccaaacagcuccaacgaaa

SEQ ID NO: 14576 - RNA, 19 nt, Artificial Sequence
  Synthetic
gaguggaaccaguggguaa

SEQ ID NO: 14577 - RNA, 19 nt, Artificial Sequence
  Synthetic
acagagaguucuuguguaa

SEQ ID NO: 14578 - RNA, 19 nt, Artificial Sequence
  Synthetic
caaauaagccacauaguaa

SEQ ID NO: 14579 - RNA, 19 nt, Artificial Sequence
  Synthetic
ccuuguaguuagaggguau

SEQ ID NO: 14580 - RNA, 19 nt, Artificial Sequence
  Synthetic
cagaagaaguagcagggaa

SEQ ID NO: 14581 - RNA, 19 nt, Artificial Sequence
  Synthetic
gagcacagcuuaugaaaga

SEQ ID NO: 14582 - RNA, 19 nt, Artificial Sequence
  Synthetic
gcaaagacacugauggaau

SEQ ID NO: 14583 - RNA, 19 nt, Artificial Sequence
  Synthetic
ggacaaagacucauacaau

SEQ ID NO: 14584 - RNA, 19 nt, Artificial Sequence
  Synthetic
ccaaagaucugcuuacaaa

SEQ ID NO: 14585 - RNA, 19 nt, Artificial Sequence
  Synthetic
gcucauaucgcaaagguua

SEQ ID NO: 14586 - RNA, 19 nt, Artificial Sequence
  Synthetic
gagaggagcugcugaaaca

SEQ ID NO: 14587 - RNA, 19 nt, Artificial Sequence
  Synthetic
gagcaauccucuaggcaga

SEQ ID NO: 14588 - RNA, 19 nt, Artificial Sequence
  Synthetic
gaaaaggaacagaguaaaa

SEQ ID NO: 14589 - RNA, 19 nt, Artificial Sequence
  Synthetic
gaagaaaagacuugaacaa

SEQ ID NO: 14590 - RNA, 19 nt, Artificial Sequence
  Synthetic
gagaggaugaagaaaguaa

SEQ ID NO: 14591 - RNA, 19 nt, Artificial Sequence
  Synthetic
ggaagaagcugcaguucau

SEQ ID NO: 14592 - RNA, 19 nt, Artificial Sequence
  Synthetic
aagaaaggagggaaggaua

SEQ ID NO: 14593 - RNA, 19 nt, Artificial Sequence
  Synthetic
cuagaauucuucagcauaa

SEQ ID NO: 14594 - RNA, 19 nt, Artificial Sequence
  Synthetic
gcaagaaacuucacugaca

SEQ ID NO: 14595 - RNA, 19 nt, Artificial Sequence
  Synthetic
caauggaaguugucaggaa

SEQ ID NO: 14596 - RNA, 19 nt, Artificial Sequence
  Synthetic
ccauguugaagaagggaaa

SEQ ID NO: 14597 - RNA, 19 nt, Artificial Sequence
  Synthetic
agauuguguuggugguaaa

SEQ ID NO: 14598 - RNA, 19 nt, Artificial Sequence
  Synthetic
aguuacuggucaugggaaa

SEQ ID NO: 14599 - RNA, 19 nt, Artificial Sequence
  Synthetic
guacagaucuugaaacaaa

SEQ ID NO: 14600 - RNA, 19 nt, Artificial Sequence
  Synthetic
cugcauaagguaaagaaua

SEQ ID NO: 14601 - RNA, 19 nt, Artificial Sequence
  Synthetic
gaauggagcagaacagaaa

SEQ ID NO: 14602 - RNA, 19 nt, Artificial Sequence
  Synthetic
uagcauggauaaagagcaa

SEQ ID NO: 14603 - RNA, 19 nt, Artificial Sequence
  Synthetic
aaagaagaauggagcagaa

SEQ ID NO: 14604 - RNA, 19 nt, Artificial Sequence
  Synthetic
ccacaaauugaaagaauga

SEQ ID NO: 14605 - RNA, 19 nt, Artificial Sequence
  Synthetic
gaaauuuauccucgaguaa

SEQ ID NO: 14606 - RNA, 19 nt, Artificial Sequence
  Synthetic
ugaaggaauuuguguggaa

SEQ ID NO: 14607 - RNA, 19 nt, Artificial Sequence
  Synthetic
gaaacagaaucuaguaaca

SEQ ID NO: 14608 - RNA, 19 nt, Artificial Sequence
  Synthetic
cagaacagaaauuggacaa

SEQ ID NO: 14609 - RNA, 19 nt, Artificial Sequence
  Synthetic
caagaagaccauccagaua

SEQ ID NO: 14610 - RNA, 19 nt, Artificial Sequence
  Synthetic
caauuuugaggaagaguua

SEQ ID NO: 14611 - RNA, 19 nt, Artificial Sequence
  Synthetic
gggaaacagaaucuaguaa

SEQ ID NO: 14612 - RNA, 19 nt, Artificial Sequence
  Synthetic
gaacagaaauuggacaaau

SEQ ID NO: 14613 - RNA, 19 nt, Artificial Sequence
  Synthetic
uggauaaagagcaaacuaa

SEQ ID NO: 14614 - RNA, 19 nt, Artificial Sequence
  Synthetic
gauccaaggcgauaaggaa

SEQ ID NO: 14615 - RNA, 19 nt, Artificial Sequence
  Synthetic
agaguuaacuugucccaua

SEQ ID NO: 14616 - RNA, 19 nt, Artificial Sequence
  Synthetic
caagaagagucuccacuua

SEQ ID NO: 14617 - RNA, 19 nt, Artificial Sequence
  Synthetic
gguaaagaauauacugugu

SEQ ID NO: 14618 - RNA, 19 nt, Artificial Sequence
  Synthetic
auguacagaucuugaaaca

SEQ ID NO: 14619 - RNA, 19 nt, Artificial Sequence
  Synthetic
gaaugaaggaaauacgaga

SEQ ID NO: 14620 - RNA, 19 nt, Artificial Sequence
  Synthetic
cuccacaaauugaaagaau

SEQ ID NO: 14621 - RNA, 19 nt, Artificial Sequence
  Synthetic
aauuaauggcacugacaau

SEQ ID NO: 14622 - RNA, 19 nt, Artificial Sequence
  Synthetic
uugaaaagcugaaagaaca

SEQ ID NO: 14623 - RNA, 19 nt, Artificial Sequence
  Synthetic
auggagaccuuuacgaauu

SEQ ID NO: 14624 - RNA, 19 nt, Artificial Sequence
  Synthetic
ggacaaauuaagaacguuc

SEQ ID NO: 14625 - RNA, 19 nt, Artificial Sequence
  Synthetic
ugaaauuuauccucgagua

SEQ ID NO: 14626 - RNA, 19 nt, Artificial Sequence
  Synthetic
caagaauauacuccacaaa

SEQ ID NO: 14627 - RNA, 19 nt, Artificial Sequence
  Synthetic
agaauggagcagaacagaa

SEQ ID NO: 14628 - RNA, 19 nt, Artificial Sequence
  Synthetic
aggaaauacgagagcagca

SEQ ID NO: 14629 - RNA, 19 nt, Artificial Sequence
  Synthetic
guacaaauacagagaccua

SEQ ID NO: 14630 - RNA, 19 nt, Artificial Sequence
  Synthetic
ccguuuagaucaagaagua

SEQ ID NO: 14631 - RNA, 19 nt, Artificial Sequence
  Synthetic
gaacaaucccugugccuua

SEQ ID NO: 14632 - RNA, 19 nt, Artificial Sequence
  Synthetic
augcaaaugggaagauaua

SEQ ID NO: 14633 - RNA, 19 nt, Artificial Sequence
  Synthetic
caguaggugcccagaauaa

SEQ ID NO: 14634 - RNA, 19 nt, Artificial Sequence
  Synthetic
gaacagaagaagaccugaa

SEQ ID NO: 14635 - RNA, 19 nt, Artificial Sequence
  Synthetic
cuugaaacgaacagaagaa

SEQ ID NO: 14636 - RNA, 19 nt, Artificial Sequence
  Synthetic
aaacugagauggcggauga

SEQ ID NO: 14637 - RNA, 19 nt, Artificial Sequence
  Synthetic
agaccuaacuguacgugaa

SEQ ID NO: 14638 - RNA, 19 nt, Artificial Sequence
  Synthetic
gauaccagcuggagguuga

SEQ ID NO: 14639 - RNA, 19 nt, Artificial Sequence
  Synthetic
aagaaguagccgagguuga

SEQ ID NO: 14640 - RNA, 19 nt, Artificial Sequence
  Synthetic
aggucaugauugugguauu

SEQ ID NO: 14641 - RNA, 19 nt, Artificial Sequence
  Synthetic
agguugagcucuucuuaaa

SEQ ID NO: 14642 - RNA, 19 nt, Artificial Sequence
  Synthetic
ggaugaaggaggaaaugga

SEQ ID NO: 14643 - RNA, 19 nt, Artificial Sequence
  Synthetic
ccaaguacaaauacagaga

SEQ ID NO: 14644 - RNA, 19 nt, Artificial Sequence
  Synthetic
cgugaaacugucaauguua

SEQ ID NO: 14645 - RNA, 19 nt, Artificial Sequence
  Synthetic
ggaaacacccacagucaga

SEQ ID NO: 14646 - RNA, 19 nt, Artificial Sequence
  Synthetic
gguuacccguuuagaucaa

SEQ ID NO: 14647 - RNA, 19 nt, Artificial Sequence
  Synthetic
ggucaugauugugguauuu

SEQ ID NO: 14648 - RNA, 19 nt, Artificial Sequence
  Synthetic
ugugguauuuggagaugaa

SEQ ID NO: 14649 - RNA, 19 nt, Artificial Sequence
  Synthetic
gaauguugggacugcuaaa

SEQ ID NO: 14650 - RNA, 19 nt, Artificial Sequence
  Synthetic
uguugggacugcuaaauaa

SEQ ID NO: 14651 - RNA, 19 nt, Artificial Sequence
  Synthetic
agaaaaugguguccaagua

SEQ ID NO: 14652 - RNA, 19 nt, Artificial Sequence
  Synthetic
gaugcaaaugggaagauau

SEQ ID NO: 14653 - RNA, 19 nt, Artificial Sequence
  Synthetic
ggacacauacccauauaau

SEQ ID NO: 14654 - RNA, 19 nt, Artificial Sequence
  Synthetic
gcaaaugggaagauauauc

SEQ ID NO: 14655 - RNA, 19 nt, Artificial Sequence
  Synthetic
ucaagaaaaugguguccaa

SEQ ID NO: 14656 - RNA, 19 nt, Artificial Sequence
  Synthetic
cuaaugaaccucacuggaa

SEQ ID NO: 14657 - RNA, 19 nt, Artificial Sequence
  Synthetic
ggaaauggaucgugcccag

SEQ ID NO: 14658 - RNA, 19 nt, Artificial Sequence
  Synthetic
gugaaacugucaauguuau

SEQ ID NO: 14659 - RNA, 19 nt, Artificial Sequence
  Synthetic
agaagaaacucgacagaua

SEQ ID NO: 14660 - RNA, 19 nt, Artificial Sequence
  Synthetic
gaguagagauggugaauau

SEQ ID NO: 14661 - RNA, 19 nt, Artificial Sequence
  Synthetic
gaaagaaacuguagacaau

SEQ ID NO: 14662 - RNA, 19 nt, Artificial Sequence
  Synthetic
gaggaggacuuaagagaaa

SEQ ID NO: 14663 - RNA, 19 nt, Artificial Sequence
  Synthetic
agaaagggaaagaggauua

SEQ ID NO: 14664 - RNA, 19 nt, Artificial Sequence
  Synthetic
gcauagugcuuuagaugaa

SEQ ID NO: 14665 - RNA, 19 nt, Artificial Sequence
  Synthetic
gaaacaagauaguggugaa

SEQ ID NO: 14666 - RNA, 19 nt, Artificial Sequence
  Synthetic
gaaaggaaaugaagaguuu

SEQ ID NO: 14667 - RNA, 19 nt, Artificial Sequence
  Synthetic
gggaauaucuguaaaguca

SEQ ID NO: 14668 - RNA, 19 nt, Artificial Sequence
  Synthetic
ggaaagaggauuaugaaga

SEQ ID NO: 14669 - RNA, 19 nt, Artificial Sequence
  Synthetic
ccucaaagauucugcauuu

SEQ ID NO: 14670 - RNA, 19 nt, Artificial Sequence
  Synthetic
ggaaaggacaagaggacuu

SEQ ID NO: 14671 - RNA, 19 nt, Artificial Sequence
  Synthetic
gggcauagguuccaaguau

SEQ ID NO: 14672 - RNA, 19 nt, Artificial Sequence
  Synthetic
acucaaaguuguauggauu

SEQ ID NO: 14673 - RNA, 19 nt, Artificial Sequence
  Synthetic
gcaaauaaggauccaauua

SEQ ID NO: 14674 - RNA, 19 nt, Artificial Sequence
  Synthetic
ggaaggagaacuaaugaaa

SEQ ID NO: 14675 - RNA, 19 nt, Artificial Sequence
  Synthetic
uggaagauauuguggauuu

SEQ ID NO: 14676 - RNA, 19 nt, Artificial Sequence
  Synthetic
agaaagaaacuguagacaa

SEQ ID NO: 14677 - RNA, 19 nt, Artificial Sequence
  Synthetic
ggugcaaguuccugugaaa

SEQ ID NO: 14678 - RNA, 19 nt, Artificial Sequence
  Synthetic
ggaaaaggaacaugaauua

SEQ ID NO: 14679 - RNA, 19 nt, Artificial Sequence
  Synthetic
ggcaagagcuagaaguaau

SEQ ID NO: 14680 - RNA, 19 nt, Artificial Sequence
  Synthetic
gugaagaugugaaggccaa

SEQ ID NO: 14681 - RNA, 19 nt, Artificial Sequence
  Synthetic
uaaauuaucuggagagaga

SEQ ID NO: 14682 - RNA, 19 nt, Artificial Sequence
  Synthetic
uuaaagaaguggagcccaa

SEQ ID NO: 14683 - RNA, 19 nt, Artificial Sequence
  Synthetic
guacauaacuucagauacu

SEQ ID NO: 14684 - RNA, 19 nt, Artificial Sequence
  Synthetic
aaugaagagcagaaagaaa

SEQ ID NO: 14685 - RNA, 19 nt, Artificial Sequence
  Synthetic
cgacaauucuucuagacaa

SEQ ID NO: 14686 - RNA, 19 nt, Artificial Sequence
  Synthetic
gccaggagauugagaauau

SEQ ID NO: 14687 - RNA, 19 nt, Artificial Sequence
  Synthetic
cugaagaacacuuggccaa

SEQ ID NO: 14688 - RNA, 19 nt, Artificial Sequence
  Synthetic
ggaauuaucugaagccgaa

SEQ ID NO: 14689 - RNA, 19 nt, Artificial Sequence
  Synthetic
gcacagaggugaugguaga

SEQ ID NO: 14690 - RNA, 19 nt, Artificial Sequence
  Synthetic
agaagaaagugaagaguca

SEQ ID NO: 14691 - RNA, 19 nt, Artificial Sequence
  Synthetic
ggacaaagacacuggucau

SEQ ID NO: 14692 - RNA, 19 nt, Artificial Sequence
  Synthetic
ucaaauuacguguggcaua

SEQ ID NO: 14693 - RNA, 19 nt, Artificial Sequence
  Synthetic
gcaccuugcgugaggacaa

SEQ ID NO: 14694 - RNA, 19 nt, Artificial Sequence
  Synthetic
ggaaugagcccuaccagaa

SEQ ID NO: 14695 - RNA, 19 nt, Artificial Sequence
  Synthetic
ggagagagaagaagaaagu

SEQ ID NO: 14696 - RNA, 19 nt, Artificial Sequence
  Synthetic
ccgaacaacaugagagacu

SEQ ID NO: 14697 - RNA, 19 nt, Artificial Sequence
  Synthetic
aauuuaagauugugggcuu

SEQ ID NO: 14698 - RNA, 19 nt, Artificial Sequence
  Synthetic
agagagaagaagaaaguga

SEQ ID NO: 14699 - RNA, 19 nt, Artificial Sequence
  Synthetic
aggacaaggacgucagcaa

SEQ ID NO: 14700 - RNA, 19 nt, Artificial Sequence
  Synthetic
gaaagugaagagucagaaa

SEQ ID NO: 14701 - RNA, 19 nt, Artificial Sequence
  Synthetic
gugaagaugaagaugauuu

SEQ ID NO: 14702 - RNA, 19 nt, Artificial Sequence
  Synthetic
ggacauaauuucugaguuu

SEQ ID NO: 14703 - RNA, 19 nt, Artificial Sequence
  Synthetic
gguuauagccuguuagaua

SEQ ID NO: 14704 - RNA, 19 nt, Artificial Sequence
  Synthetic
gagcuaaaccacugagaaa

SEQ ID NO: 14705 - RNA, 19 nt, Artificial Sequence
  Synthetic
caaaguuaguggagacaaa

SEQ ID NO: 14706 - RNA, 19 nt, Artificial Sequence
  Synthetic
gaauguauauccugagaaa

SEQ ID NO: 14707 - RNA, 19 nt, Artificial Sequence
  Synthetic
ucuaauggguuguggcuua

SEQ ID NO: 14708 - RNA, 19 nt, Artificial Sequence
  Synthetic
gcagagagccuuuggaaga

SEQ ID NO: 14709 - RNA, 19 nt, Artificial Sequence
  Synthetic
ggaagaugauccuguguau

SEQ ID NO: 14710 - RNA, 19 nt, Artificial Sequence
  Synthetic
ccaagaacuuccagauuga

SEQ ID NO: 14711 - RNA, 19 nt, Artificial Sequence
  Synthetic
gacgaaggguaaagaagaa

SEQ ID NO: 14712 - RNA, 19 nt, Artificial Sequence
  Synthetic
gggaacagcuugauuucua

SEQ ID NO: 14713 - RNA, 19 nt, Artificial Sequence
  Synthetic
ggacgaaggguaaagaaga

SEQ ID NO: 14714 - RNA, 19 nt, Artificial Sequence
  Synthetic
agaagaaacugcaccguau

SEQ ID NO: 14715 - RNA, 19 nt, Artificial Sequence
  Synthetic
ugagaacagccaugaaaua

SEQ ID NO: 14716 - RNA, 19 nt, Artificial Sequence
  Synthetic
ggacaacgcuugauuugaa

SEQ ID NO: 14717 - RNA, 19 nt, Artificial Sequence
  Synthetic
caaauaauguggugacagu

SEQ ID NO: 14718 - RNA, 19 nt, Artificial Sequence
  Synthetic
ccacaggaauauauaccua

SEQ ID NO: 14719 - RNA, 19 nt, Artificial Sequence
  Synthetic
ccacaaagaugguaauaaa

SEQ ID NO: 14720 - RNA, 19 nt, Artificial Sequence
  Synthetic
gagcagaagcugucacaaa

SEQ ID NO: 14721 - RNA, 19 nt, Artificial Sequence
  Synthetic
ggacagaguauuucauuaa

SEQ ID NO: 14722 - RNA, 19 nt, Artificial Sequence
  Synthetic
aggcaaagucuuacugaaa

SEQ ID NO: 14723 - RNA, 19 nt, Artificial Sequence
  Synthetic
guggaaaucuguaggauca

SEQ ID NO: 14724 - RNA, 19 nt, Artificial Sequence
  Synthetic
gggcaguggugcaaucaua

SEQ ID NO: 14725 - RNA, 19 nt, Artificial Sequence
  Synthetic
aggaagugauagacagcau

SEQ ID NO: 14726 - RNA, 19 nt, Artificial Sequence
  Synthetic
ccacaaagauggcuucaga

SEQ ID NO: 14727 - RNA, 19 nt, Artificial Sequence
  Synthetic
ccagguagcaggaacuaua

SEQ ID NO: 14728 - RNA, 19 nt, Artificial Sequence
  Synthetic
ggaagauagagcaggcuga

SEQ ID NO: 14729 - RNA, 19 nt, Artificial Sequence
  Synthetic
agcagagugucuuggaaua

SEQ ID NO: 14730 - RNA, 19 nt, Artificial Sequence
  Synthetic
agacaguaacuuuggugua

SEQ ID NO: 14731 - RNA, 19 nt, Artificial Sequence
  Synthetic
caguaacuuugguguaaau

SEQ ID NO: 14732 - RNA, 19 nt, Artificial Sequence
  Synthetic
ccacaagcccuuuggucuu

SEQ ID NO: 14733 - RNA, 19 nt, Artificial Sequence
  Synthetic
aggacagaguauuucauua

SEQ ID NO: 14734 - RNA, 19 nt, Artificial Sequence
  Synthetic
gagcccagccugacacaua

SEQ ID NO: 14735 - RNA, 19 nt, Artificial Sequence
  Synthetic
agauagagcaggcugaaca

SEQ ID NO: 14736 - RNA, 19 nt, Artificial Sequence
  Synthetic
gcaacaagauaucagcuga

SEQ ID NO: 14737 - RNA, 19 nt, Artificial Sequence
  Synthetic
gaccaagaauucacugcaa

SEQ ID NO: 14738 - RNA, 19 nt, Artificial Sequence
  Synthetic
uuaauaaagcgaugguuga

SEQ ID NO: 14739 - RNA, 19 nt, Artificial Sequence
  Synthetic
cuccugggcucaagcgaua

SEQ ID NO: 14740 - RNA, 19 nt, Artificial Sequence
  Synthetic
gacaguaacuuugguguaa

SEQ ID NO: 14741 - RNA, 19 nt, Artificial Sequence
  Synthetic
acaaagauggcuucagaga

SEQ ID NO: 14742 - RNA, 19 nt, Artificial Sequence
  Synthetic
ccaagaauucacugcaaca

SEQ ID NO: 14743 - RNA, 19 nt, Artificial Sequence
  Synthetic
agcccaacauuuagcuuua

SEQ ID NO: 14744 - RNA, 19 nt, Artificial Sequence
  Synthetic
aggaugugccugaggaguu

SEQ ID NO: 14745 - RNA, 19 nt, Artificial Sequence
  Synthetic
guaucaagcgguuggaagu

SEQ ID NO: 14746 - RNA, 19 nt, Artificial Sequence
  Synthetic
gaaugugccuccugcaaaa

SEQ ID NO: 14747 - RNA, 19 nt, Artificial Sequence
  Synthetic
gcauguagcaaaagcauuu

SEQ ID NO: 14748 - RNA, 19 nt, Artificial Sequence
  Synthetic
ggaaggaacagccuaaaga

SEQ ID NO: 14749 - RNA, 19 nt, Artificial Sequence
  Synthetic
gcucagaccugcaagagaa

SEQ ID NO: 14750 - RNA, 19 nt, Artificial Sequence
  Synthetic
cggcagugaagcagacaua

SEQ ID NO: 14751 - RNA, 19 nt, Artificial Sequence
  Synthetic
gggaggaggacaucgguaa

SEQ ID NO: 14752 - RNA, 19 nt, Artificial Sequence
  Synthetic
ggucaaggcuguuacccua

SEQ ID NO: 14753 - RNA, 19 nt, Artificial Sequence
  Synthetic
cagcagaacugguagccuu

SEQ ID NO: 14754 - RNA, 19 nt, Artificial Sequence
  Synthetic
uuucagaaguacagggcau

SEQ ID NO: 14755 - RNA, 19 nt, Artificial Sequence
  Synthetic
ccuucuaccuuguuugaaa

SEQ ID NO: 14756 - RNA, 19 nt, Artificial Sequence
  Synthetic
ccauugacuuugagaagga

SEQ ID NO: 14757 - RNA, 19 nt, Artificial Sequence
  Synthetic
ccuuauaccuuuagcaucu

SEQ ID NO: 14758 - RNA, 19 nt, Artificial Sequence
  Synthetic
gagaaaucaucguuacaga

SEQ ID NO: 14759 - RNA, 19 nt, Artificial Sequence
  Synthetic
gcuaugguuucuaugguua

SEQ ID NO: 14760 - RNA, 19 nt, Artificial Sequence
  Synthetic
ggaggaggacaucgguaaa

SEQ ID NO: 14761 - RNA, 19 nt, Artificial Sequence
  Synthetic
ggaaaucagcccauggaga

SEQ ID NO: 14762 - RNA, 19 nt, Artificial Sequence
  Synthetic
agucaaaucugaaucgaca

SEQ ID NO: 14763 - RNA, 19 nt, Artificial Sequence
  Synthetic
agaaggaugaugacagcaa

SEQ ID NO: 14764 - RNA, 19 nt, Artificial Sequence
  Synthetic
cagacaagcucccuggauu

SEQ ID NO: 14765 - RNA, 19 nt, Artificial Sequence
  Synthetic
gaaaugauccucacagauu

SEQ ID NO: 14766 - RNA, 19 nt, Artificial Sequence
  Synthetic
ucaaaguaccuaagaagau

SEQ ID NO: 14767 - RNA, 19 nt, Artificial Sequence
  Synthetic
ccugaauccuaauaaagaa

SEQ ID NO: 14768 - RNA, 19 nt, Artificial Sequence
  Synthetic
gcguggagaucgcuaagaa

SEQ ID NO: 14769 - RNA, 19 nt, Artificial Sequence
  Synthetic
ggucaaaguaccuaagaag

SEQ ID NO: 14770 - RNA, 19 nt, Artificial Sequence
  Synthetic
ucaaacaguuccucgacua

SEQ ID NO: 14771 - RNA, 19 nt, Artificial Sequence
  Synthetic
gggaugaguuugaaggccu

SEQ ID NO: 14772 - RNA, 19 nt, Artificial Sequence
  Synthetic
ugcaagagaagcugggcaa

SEQ ID NO: 14773 - RNA, 19 nt, Artificial Sequence
  Synthetic
uggccaaugcccuggacaa

SEQ ID NO: 14774 - RNA, 19 nt, Artificial Sequence
  Synthetic
cagaaaaugucaaccagua

SEQ ID NO: 14775 - RNA, 19 nt, Artificial Sequence
  Synthetic
gggaugucacgaaguuaaa

SEQ ID NO: 14776 - RNA, 19 nt, Artificial Sequence
  Synthetic
gaaaucagcccauggagau

SEQ ID NO: 14777 - RNA, 19 nt, Artificial Sequence
  Synthetic
gcagugaagcagacauaga

SEQ ID NO: 14778 - RNA, 19 nt, Artificial Sequence
  Synthetic
cggcgaggaugucgagguu

SEQ ID NO: 14779 - RNA, 19 nt, Artificial Sequence
  Synthetic
agagagagauuaugagcaa

SEQ ID NO: 14780 - RNA, 19 nt, Artificial Sequence
  Synthetic
gcgaggagccggagaagaa

SEQ ID NO: 14781 - RNA, 19 nt, Artificial Sequence
  Synthetic
gccuaaagauauuggaaga

SEQ ID NO: 14782 - RNA, 19 nt, Artificial Sequence
  Synthetic
cauuugaagcagaaagaaa

SEQ ID NO: 14783 - RNA, 19 nt, Artificial Sequence
  Synthetic
aaugauaccuggagagaga

SEQ ID NO: 14784 - RNA, 19 nt, Artificial Sequence
  Synthetic
cagaagguuuuaaaggaaa

SEQ ID NO: 14785 - RNA, 19 nt, Artificial Sequence
  Synthetic
acagaagguuuuaaaggaa

SEQ ID NO: 14786 - RNA, 19 nt, Artificial Sequence
  Synthetic
cauuggagcuggcggcuua

SEQ ID NO: 14787 - RNA, 19 nt, Artificial Sequence
  Synthetic
ugaaguugcugcagaauuu

SEQ ID NO: 14788 - RNA, 19 nt, Artificial Sequence
  Synthetic
uacaggagguuuuggauua

SEQ ID NO: 14789 - RNA, 19 nt, Artificial Sequence
  Synthetic
gcuaagaaguugaaucgau

SEQ ID NO: 14790 - RNA, 19 nt, Artificial Sequence
  Synthetic
ggagcagccuuuuggagaa

SEQ ID NO: 14791 - RNA, 19 nt, Artificial Sequence
  Synthetic
gcugaauaccugugcauga

SEQ ID NO: 14792 - RNA, 19 nt, Artificial Sequence
  Synthetic
aagcagaaagaaaggaaaa

SEQ ID NO: 14793 - RNA, 19 nt, Artificial Sequence
  Synthetic
gaagcagaaagaaaggaaa

SEQ ID NO: 14794 - RNA, 19 nt, Artificial Sequence
  Synthetic
gcugauaucucuucuaaau

SEQ ID NO: 14795 - RNA, 19 nt, Artificial Sequence
  Synthetic
caauagugcuucucugcaa

SEQ ID NO: 14796 - RNA, 19 nt, Artificial Sequence
  Synthetic
agagagagcaucacaauau

SEQ ID NO: 14797 - RNA, 19 nt, Artificial Sequence
  Synthetic
gguguuacguauaggcuca

SEQ ID NO: 14798 - RNA, 19 nt, Artificial Sequence
  Synthetic
agaugauccugaacauaua

SEQ ID NO: 14799 - RNA, 19 nt, Artificial Sequence
  Synthetic
cagcuaaacuacaggaggu

SEQ ID NO: 14800 - RNA, 19 nt, Artificial Sequence
  Synthetic
gaagauggauaaauggcau

SEQ ID NO: 14801 - RNA, 19 nt, Artificial Sequence
  Synthetic
ggcugaaguugcugcagaa

SEQ ID NO: 14802 - RNA, 19 nt, Artificial Sequence
  Synthetic
gguaaccucuauugaagaa

SEQ ID NO: 14803 - RNA, 19 nt, Artificial Sequence
  Synthetic
ggaaccauguaaagaaguu

SEQ ID NO: 14804 - RNA, 19 nt, Artificial Sequence
  Synthetic
agaacacuguauugaguau

SEQ ID NO: 14805 - RNA, 19 nt, Artificial Sequence
  Synthetic
gaagaacgaacaaggccaa

SEQ ID NO: 14806 - RNA, 19 nt, Artificial Sequence
  Synthetic
gcuggaaccauguaaagaa

SEQ ID NO: 14807 - RNA, 19 nt, Artificial Sequence
  Synthetic
gagaugauccugaacauau

SEQ ID NO: 14808 - RNA, 19 nt, Artificial Sequence
  Synthetic
gaagaaaagaaggagaaua

SEQ ID NO: 14809 - RNA, 19 nt, Artificial Sequence
  Synthetic
ggacaaacauggauggaau

SEQ ID NO: 14810 - RNA, 19 nt, Artificial Sequence
  Synthetic
ggaagcagcaggaggaaua

SEQ ID NO: 14811 - RNA, 19 nt, Artificial Sequence
  Synthetic
aauaaguaaugguggguua

SEQ ID NO: 14812 - RNA, 19 nt, Artificial Sequence
  Synthetic
gguuauacaagaagaggaa

SEQ ID NO: 14813 - RNA, 19 nt, Artificial Sequence
  Synthetic
aagaagaggaagagauaau

SEQ ID NO: 14814 - RNA, 19 nt, Artificial Sequence
  Synthetic
uggaagaccucauggccaa

SEQ ID NO: 14815 - RNA, 19 nt, Artificial Sequence
  Synthetic
gcucgaaugacaauaaaua

SEQ ID NO: 14816 - RNA, 19 nt, Artificial Sequence
  Synthetic
aggaaaaccuguugaucua

SEQ ID NO: 14817 - RNA, 19 nt, Artificial Sequence
  Synthetic
gggaauuguaagcgacuau

SEQ ID NO: 14818 - RNA, 19 nt, Artificial Sequence
  Synthetic
ggaacuagccaauaugaau

SEQ ID NO: 14819 - RNA, 19 nt, Artificial Sequence
  Synthetic
aaguaaaguucaagcagca

SEQ ID NO: 14820 - RNA, 19 nt, Artificial Sequence
  Synthetic
cugcaaagcuggaggagca

SEQ ID NO: 14821 - RNA, 19 nt, Artificial Sequence
  Synthetic
aggaagagccacuggaaga

SEQ ID NO: 14822 - RNA, 19 nt, Artificial Sequence
  Synthetic
aggaagugcugaaggcaau

SEQ ID NO: 14823 - RNA, 19 nt, Artificial Sequence
  Synthetic
cagcacggguugaggguga

SEQ ID NO: 14824 - RNA, 19 nt, Artificial Sequence
  Synthetic
cuucgaagcuacuggauga

SEQ ID NO: 14825 - RNA, 19 nt, Artificial Sequence
  Synthetic
uggaagagccacuggauga

SEQ ID NO: 14826 - RNA, 19 nt, Artificial Sequence
  Synthetic
ggacagaggaagagccacu

SEQ ID NO: 14827 - RNA, 19 nt, Artificial Sequence
  Synthetic
ccacagaacuggcaagacu

SEQ ID NO: 14828 - RNA, 19 nt, Artificial Sequence
  Synthetic
cccaagacugugagacaua

SEQ ID NO: 14829 - RNA, 19 nt, Artificial Sequence
  Synthetic
caggaagugcugaaggcaa

SEQ ID NO: 14830 - RNA, 19 nt, Artificial Sequence
  Synthetic
gggccugaacccagacuua

SEQ ID NO: 14831 - RNA, 19 nt, Artificial Sequence
  Synthetic
uaauaaagugcuugaggau

SEQ ID NO: 14832 - RNA, 19 nt, Artificial Sequence
  Synthetic
ucucgggaauugagggaau

SEQ ID NO: 14833 - RNA, 19 nt, Artificial Sequence
  Synthetic
gacccaagacugugagaca

SEQ ID NO: 14834 - RNA, 19 nt, Artificial Sequence
  Synthetic
caucuuugcuaguaaucua

SEQ ID NO: 14835 - RNA, 19 nt, Artificial Sequence
  Synthetic
ugucauaagcauggaguuu

SEQ ID NO: 14836 - RNA, 19 nt, Artificial Sequence
  Synthetic
gggcagugcuacaguauuc

SEQ ID NO: 14837 - RNA, 19 nt, Artificial Sequence
  Synthetic
agcagaaggaacugaacaa

SEQ ID NO: 14838 - RNA, 19 nt, Artificial Sequence
  Synthetic
gggcuaucacugaagucaa

SEQ ID NO: 14839 - RNA, 19 nt, Artificial Sequence
  Synthetic
ugaacaaagcccuggaagu

SEQ ID NO: 14840 - RNA, 19 nt, Artificial Sequence
  Synthetic
cuaauaaagugcuugagga

SEQ ID NO: 14841 - RNA, 19 nt, Artificial Sequence
  Synthetic
gcaggugucuugagcccua

SEQ ID NO: 14842 - RNA, 19 nt, Artificial Sequence
  Synthetic
gaauugagggaaugguuga

SEQ ID NO: 14843 - RNA, 19 nt, Artificial Sequence
  Synthetic
ccuggagauuggagacaca

SEQ ID NO: 14844 - RNA, 19 nt, Artificial Sequence
  Synthetic
gcgaauugugggccagauu

SEQ ID NO: 14845 - RNA, 19 nt, Artificial Sequence
  Synthetic
auggagacuuggugacuuu

SEQ ID NO: 14846 - RNA, 19 nt, Artificial Sequence
  Synthetic
cacaguaggcacucaauaa

SEQ ID NO: 14847 - RNA, 19 nt, Artificial Sequence
  Synthetic
ccgagguggccaagaacuu

SEQ ID NO: 14848 - RNA, 19 nt, Artificial Sequence
  Synthetic
gcaagcgaauugugggcca

SEQ ID NO: 14849 - RNA, 19 nt, Artificial Sequence
  Synthetic
augccaaguuucagaauua

SEQ ID NO: 14850 - RNA, 19 nt, Artificial Sequence
  Synthetic
cuaaaggaguacagcaauu

SEQ ID NO: 14851 - RNA, 19 nt, Artificial Sequence
  Synthetic
ggaauauggccuacagaga

SEQ ID NO: 14852 - RNA, 19 nt, Artificial Sequence
  Synthetic
gcagaggaauggaaacaau

SEQ ID NO: 14853 - RNA, 19 nt, Artificial Sequence
  Synthetic
gaacaaacgggaauaugaa

SEQ ID NO: 14854 - RNA, 19 nt, Artificial Sequence
  Synthetic
ggaagggagcauagcauau

SEQ ID NO: 14855 - RNA, 19 nt, Artificial Sequence
  Synthetic
gcaagaaggagaaaguuga

SEQ ID NO: 14856 - RNA, 19 nt, Artificial Sequence
  Synthetic
guugaaggacucagcuaaa

SEQ ID NO: 14857 - RNA, 19 nt, Artificial Sequence
  Synthetic
caggagaacaaacgggaau

SEQ ID NO: 14858 - RNA, 19 nt, Artificial Sequence
  Synthetic
gagcagaggaauggaaaca

SEQ ID NO: 14859 - RNA, 19 nt, Artificial Sequence
  Synthetic
cuaugcagaugguaguaua

SEQ ID NO: 14860 - RNA, 19 nt, Artificial Sequence
  Synthetic
gggagcagaggaauggaaa

SEQ ID NO: 14861 - RNA, 19 nt, Artificial Sequence
  Synthetic
cagcaauuguaguaacuga

SEQ ID NO: 14862 - RNA, 19 nt, Artificial Sequence
  Synthetic
aauauggccuacagagaau

SEQ ID NO: 14863 - RNA, 19 nt, Artificial Sequence
  Synthetic
aaugauugcugaaguguuu

SEQ ID NO: 14864 - RNA, 19 nt, Artificial Sequence
  Synthetic
acaaguaacccauguaaaa

SEQ ID NO: 14865 - RNA, 19 nt, Artificial Sequence
  Synthetic
gaauauggccuacagagaa

SEQ ID NO: 14866 - RNA, 19 nt, Artificial Sequence
  Synthetic
gugaauguguuuggaauau

SEQ ID NO: 14867 - RNA, 19 nt, Artificial Sequence
  Synthetic
gcauaucuguggcaaacua

SEQ ID NO: 14868 - RNA, 19 nt, Artificial Sequence
  Synthetic
ggauggaacauuuaaacuu

SEQ ID NO: 14869 - RNA, 19 nt, Artificial Sequence
  Synthetic
gagaauagaaacaaaucca

SEQ ID NO: 14870 - RNA, 19 nt, Artificial Sequence
  Synthetic
aauaaaccaccuacaguua

SEQ ID NO: 14871 - RNA, 19 nt, Artificial Sequence
  Synthetic
agaacaaacgggaauauga

SEQ ID NO: 14872 - RNA, 19 nt, Artificial Sequence
  Synthetic
gcacaaguaacccauguaa

SEQ ID NO: 14873 - RNA, 19 nt, Artificial Sequence
  Synthetic
acucaauuguccaucuuua

SEQ ID NO: 14874 - RNA, 19 nt, Artificial Sequence
  Synthetic
agcuguaccaggagaacaa

SEQ ID NO: 14875 - RNA, 19 nt, Artificial Sequence
  Synthetic
aguuauugcugcaugcuuu

SEQ ID NO: 14876 - RNA, 19 nt, Artificial Sequence
  Synthetic
caagaaggagaaaguugaa

SEQ ID NO: 14877 - RNA, 19 nt, Artificial Sequence
  Synthetic
cuucacuuguguuggauuu

SEQ ID NO: 14878 - RNA, 19 nt, Artificial Sequence
  Synthetic
gauacuaagaucucaguca

SEQ ID NO: 14879 - RNA, 19 nt, Artificial Sequence
  Synthetic
gaacaaagcuggaaugauu

SEQ ID NO: 14880 - RNA, 19 nt, Artificial Sequence
  Synthetic
auacauaacuucagugcaa

SEQ ID NO: 14881 - RNA, 19 nt, Artificial Sequence
  Synthetic
caaacgagaauaugagaaa

SEQ ID NO: 14882 - RNA, 19 nt, Artificial Sequence
  Synthetic
aggcugagguggcagaaua

SEQ ID NO: 14883 - RNA, 19 nt, Artificial Sequence
  Synthetic
ggagggaaaucuuggugua

SEQ ID NO: 14884 - RNA, 19 nt, Artificial Sequence
  Synthetic
caagagacuuugucacuua

SEQ ID NO: 14885 - RNA, 19 nt, Artificial Sequence
  Synthetic
ggaaaacaaacgagaauau

SEQ ID NO: 14886 - RNA, 19 nt, Artificial Sequence
  Synthetic
caucuuaguuuacuggaua

SEQ ID NO: 14887 - RNA, 19 nt, Artificial Sequence
  Synthetic
ggcaaaggcgggaggauca

SEQ ID NO: 14888 - RNA, 19 nt, Artificial Sequence
  Synthetic
gcuuguguaucuugauuaa

SEQ ID NO: 14889 - RNA, 19 nt, Artificial Sequence
  Synthetic
agacauaacugguuugacu

SEQ ID NO: 14890 - RNA, 19 nt, Artificial Sequence
  Synthetic
aguuauauuuggaccagaa

SEQ ID NO: 14891 - RNA, 19 nt, Artificial Sequence
  Synthetic
gguagcauauguuuagaua

SEQ ID NO: 14892 - RNA, 19 nt, Artificial Sequence
  Synthetic
gcacagcuuuaucaggaaa

SEQ ID NO: 14893 - RNA, 19 nt, Artificial Sequence
  Synthetic
gcaguggaaugcaguuaua

SEQ ID NO: 14894 - RNA, 19 nt, Artificial Sequence
  Synthetic
guauuuaggccauuuguua

SEQ ID NO: 14895 - RNA, 19 nt, Artificial Sequence
  Synthetic
caggaaaacaaacgagaau

SEQ ID NO: 14896 - RNA, 19 nt, Artificial Sequence
  Synthetic
acacagagaacacaaauuu

SEQ ID NO: 14897 - RNA, 19 nt, Artificial Sequence
  Synthetic
acaacaucaugcaguggaa

SEQ ID NO: 14898 - RNA, 19 nt, Artificial Sequence
  Synthetic
gcacauauuggagggaaau

SEQ ID NO: 14899 - RNA, 19 nt, Artificial Sequence
  Synthetic
guuuagauauccuucagaa

SEQ ID NO: 14900 - RNA, 19 nt, Artificial Sequence
  Synthetic
uauccuaugccuucaaaua

SEQ ID NO: 14901 - RNA, 19 nt, Artificial Sequence
  Synthetic
gaguaauucuagacauaac

SEQ ID NO: 14902 - RNA, 19 nt, Artificial Sequence
  Synthetic
gagggaaaucuugguguaa

SEQ ID NO: 14903 - RNA, 19 nt, Artificial Sequence
  Synthetic
gagcugugauuaugccauu

SEQ ID NO: 14904 - RNA, 19 nt, Artificial Sequence
  Synthetic
gcacuugccuguagucuca

SEQ ID NO: 14905 - RNA, 19 nt, Artificial Sequence
  Synthetic
gggagacgggauaguguuu

SEQ ID NO: 14906 - RNA, 19 nt, Artificial Sequence
  Synthetic
acuaaguuauugcugcaua

SEQ ID NO: 14907 - RNA, 19 nt, Artificial Sequence
  Synthetic
cgggauaguguuucuguuu

SEQ ID NO: 14908 - RNA, 19 nt, Artificial Sequence
  Synthetic
agcaauacccugucuuuaa

SEQ ID NO: 14909 - RNA, 19 nt, Artificial Sequence
  Synthetic
gguauaagcucucgcuaga

SEQ ID NO: 14910 - RNA, 19 nt, Artificial Sequence
  Synthetic
aagaaguaccugcaagaaa

SEQ ID NO: 14911 - RNA, 19 nt, Artificial Sequence
  Synthetic
cgguugagcccuuguauau

SEQ ID NO: 14912 - RNA, 19 nt, Artificial Sequence
  Synthetic
ccacagcuuuuaagaagua

SEQ ID NO: 14913 - RNA, 19 nt, Artificial Sequence
  Synthetic
ccauggagcagcuggaaca

SEQ ID NO: 14914 - RNA, 19 nt, Artificial Sequence
  Synthetic
ggagaacccaacauugaua

SEQ ID NO: 14915 - RNA, 19 nt, Artificial Sequence
  Synthetic
guauaggacucuuuaucuu

SEQ ID NO: 14916 - RNA, 19 nt, Artificial Sequence
  Synthetic
cuggaacaguauaugaaga

SEQ ID NO: 14917 - RNA, 19 nt, Artificial Sequence
  Synthetic
uaaauuaagccucgguuga

SEQ ID NO: 14918 - RNA, 19 nt, Artificial Sequence
  Synthetic
uggagcagcuggaacagua

SEQ ID NO: 14919 - RNA, 19 nt, Artificial Sequence
  Synthetic
agaaguaccugcaagaaac

SEQ ID NO: 14920 - RNA, 19 nt, Artificial Sequence
  Synthetic
uuaagaaguaccugcaaga

SEQ ID NO: 14921 - RNA, 19 nt, Artificial Sequence
  Synthetic
uaucuugagcugugguauu

SEQ ID NO: 14922 - RNA, 19 nt, Artificial Sequence
  Synthetic
guugagcccuuguauauua

SEQ ID NO: 14923 - RNA, 19 nt, Artificial Sequence
  Synthetic
ugcaagaaaccuacucaaa

SEQ ID NO: 14924 - RNA, 19 nt, Artificial Sequence
  Synthetic
cagacaaccuuuucaaaug

SEQ ID NO: 14925 - RNA, 19 nt, Artificial Sequence
  Synthetic
uaggagaacccaacauuga

SEQ ID NO: 14926 - RNA, 19 nt, Artificial Sequence
  Synthetic
caagaaaccuacucaaagc

SEQ ID NO: 14927 - RNA, 19 nt, Artificial Sequence
  Synthetic
cagcuggaacaguauauga

SEQ ID NO: 14928 - RNA, 19 nt, Artificial Sequence
  Synthetic
gcaagaaaccuacucaaag

SEQ ID NO: 14929 - RNA, 19 nt, Artificial Sequence
  Synthetic
gagcagcuggaacaguaua

SEQ ID NO: 14930 - RNA, 19 nt, Artificial Sequence
  Synthetic
gagcccuuguauauuaaau

SEQ ID NO: 14931 - RNA, 19 nt, Artificial Sequence
  Synthetic
cgagcgaguuccugucucu

SEQ ID NO: 14932 - RNA, 19 nt, Artificial Sequence
  Synthetic
ggaccauucugcucuccau

SEQ ID NO: 14933 - RNA, 19 nt, Artificial Sequence
  Synthetic
ggucugcccuguaugaugu

SEQ ID NO: 14934 - RNA, 19 nt, Artificial Sequence
  Synthetic
uacaaugcgcccacaguga

SEQ ID NO: 14935 - RNA, 19 nt, Artificial Sequence
  Synthetic
ucuaggagaacccaacauu

SEQ ID NO: 14936 - RNA, 19 nt, Artificial Sequence
  Synthetic
uaacauaugccuggacauc

SEQ ID NO: 14937 - RNA, 19 nt, Artificial Sequence
  Synthetic
gguugagcccuuguauauu

SEQ ID NO: 14938 - RNA, 19 nt, Artificial Sequence
  Synthetic
uaagaaguaccugcaagaa

SEQ ID NO: 14939 - RNA, 19 nt, Artificial Sequence
  Synthetic
gagaauggacucagaaaua

SEQ ID NO: 14940 - RNA, 19 nt, Artificial Sequence
  Synthetic
caacagacaugcaagagaa

SEQ ID NO: 14941 - RNA, 19 nt, Artificial Sequence
  Synthetic
cagaaagaauugagugauc

SEQ ID NO: 14942 - RNA, 19 nt, Artificial Sequence
  Synthetic
gcauugagaaagacauuua

SEQ ID NO: 14943 - RNA, 19 nt, Artificial Sequence
  Synthetic
ggaaguauuugucucgaua

SEQ ID NO: 14944 - RNA, 19 nt, Artificial Sequence
  Synthetic
gaaagaauugagugaucua

SEQ ID NO: 14945 - RNA, 19 nt, Artificial Sequence
  Synthetic
uuguaugcauugagaaaga

SEQ ID NO: 14946 - RNA, 19 nt, Artificial Sequence
  Synthetic
ccaugaaaccauuugauuu

SEQ ID NO: 14947 - RNA, 19 nt, Artificial Sequence
  Synthetic
cagcuggaccugugggaga

SEQ ID NO: 14948 - RNA, 19 nt, Artificial Sequence
  Synthetic
aggaagauguguaacuuuu

SEQ ID NO: 14949 - RNA, 19 nt, Artificial Sequence
  Synthetic
cauaaacaguaauggaagu

SEQ ID NO: 14950 - RNA, 19 nt, Artificial Sequence
  Synthetic
aggauauucuguagauuga

SEQ ID NO: 14951 - RNA, 19 nt, Artificial Sequence
  Synthetic
cuaaguaggaagaugugua

SEQ ID NO: 14952 - RNA, 19 nt, Artificial Sequence
  Synthetic
ugaauuaauugcacugcua

SEQ ID NO: 14953 - RNA, 19 nt, Artificial Sequence
  Synthetic
guagauugauugcagauuu

SEQ ID NO: 14954 - RNA, 19 nt, Artificial Sequence
  Synthetic
cugaaaagcaaccaaauua

SEQ ID NO: 14955 - RNA, 19 nt, Artificial Sequence
  Synthetic
aagagaauggacucagaaa

SEQ ID NO: 14956 - RNA, 19 nt, Artificial Sequence
  Synthetic
gcaagagaauggacucaga

SEQ ID NO: 14957 - RNA, 19 nt, Artificial Sequence
  Synthetic
gcacaaaucuauaaaucag

SEQ ID NO: 14958 - RNA, 19 nt, Artificial Sequence
  Synthetic
cauccaaacauaaacagua

SEQ ID NO: 14959 - RNA, 19 nt, Artificial Sequence
  Synthetic
agagaauggacucagaaau

SEQ ID NO: 14960 - RNA, 19 nt, Artificial Sequence
  Synthetic
aguaccagauauugcacaa

SEQ ID NO: 14961 - RNA, 19 nt, Artificial Sequence
  Synthetic
ggaagauguguaacuuuua

SEQ ID NO: 14962 - RNA, 19 nt, Artificial Sequence
  Synthetic
ccauggcgcugaagaggau

SEQ ID NO: 14963 - RNA, 19 nt, Artificial Sequence
  Synthetic
caacauuagcaguaaauug

SEQ ID NO: 14964 - RNA, 19 nt, Artificial Sequence
  Synthetic
cccaacggcugauaauuaa

SEQ ID NO: 14965 - RNA, 19 nt, Artificial Sequence
  Synthetic
gaucuacaaugcagcugaa

SEQ ID NO: 14966 - RNA, 19 nt, Artificial Sequence
  Synthetic
ugucuaagaugucaguuuu

SEQ ID NO: 14967 - RNA, 19 nt, Artificial Sequence
  Synthetic
caaugcagcugaaaagcaa

SEQ ID NO: 14968 - RNA, 19 nt, Artificial Sequence
  Synthetic
gaaaugaucuuuacacugu

SEQ ID NO: 14969 - RNA, 19 nt, Artificial Sequence
  Synthetic
uggauaaccucuacaaaua

SEQ ID NO: 14970 - RNA, 19 nt, Artificial Sequence
  Synthetic
gggaauggacucagaagua

SEQ ID NO: 14971 - RNA, 19 nt, Artificial Sequence
  Synthetic
cagcauuugucuugauauu

SEQ ID NO: 14972 - RNA, 19 nt, Artificial Sequence
  Synthetic
gagaaaaguacaacagaau

SEQ ID NO: 14973 - RNA, 19 nt, Artificial Sequence
  Synthetic
cuaucaggguggaguauuu

SEQ ID NO: 14974 - RNA, 19 nt, Artificial Sequence
  Synthetic
caacagaauagcucgggaa

SEQ ID NO: 14975 - RNA, 19 nt, Artificial Sequence
  Synthetic
agagaauccacaaggaauu

SEQ ID NO: 14976 - RNA, 19 nt, Artificial Sequence
  Synthetic
cuacaaaacagauagagaa

SEQ ID NO: 14977 - RNA, 19 nt, Artificial Sequence
  Synthetic
gaagagaauccacaaggaa

SEQ ID NO: 14978 - RNA, 19 nt, Artificial Sequence
  Synthetic
agagaaaaguacaacagaa

SEQ ID NO: 14979 - RNA, 19 nt, Artificial Sequence
  Synthetic
agaaguaugcgauguaauu

SEQ ID NO: 14980 - RNA, 19 nt, Artificial Sequence
  Synthetic
ggauaaccucuacaaauaa

SEQ ID NO: 14981 - RNA, 19 nt, Artificial Sequence
  Synthetic
aagagaauccacaaggaau

SEQ ID NO: 14982 - RNA, 19 nt, Artificial Sequence
  Synthetic
caaaacagauagagaaaag

SEQ ID NO: 14983 - RNA, 19 nt, Artificial Sequence
  Synthetic
ggaauggacucagaaguau

SEQ ID NO: 14984 - RNA, 19 nt, Artificial Sequence
  Synthetic
cuacaauaauggggccaaa

SEQ ID NO: 14985 - RNA, 19 nt, Artificial Sequence
  Synthetic
ggagaugauauguuccauu

SEQ ID NO: 14986 - RNA, 19 nt, Artificial Sequence
  Synthetic
caaaaguacucuuguccau

SEQ ID NO: 14987 - RNA, 19 nt, Artificial Sequence
  Synthetic
acaaggaauugaaugaucu

SEQ ID NO: 14988 - RNA, 19 nt, Artificial Sequence
  Synthetic
cagaauagcucgggaaugg

SEQ ID NO: 14989 - RNA, 19 nt, Artificial Sequence
  Synthetic
ugaagagaauccacaagga

SEQ ID NO: 14990 - RNA, 19 nt, Artificial Sequence
  Synthetic
uuggauaaccucuacaaau

SEQ ID NO: 14991 - RNA, 19 nt, Artificial Sequence
  Synthetic
gaaaaguacaacagaauag

SEQ ID NO: 14992 - RNA, 19 nt, Artificial Sequence
  Synthetic
gcucgggaauggacucaga

SEQ ID NO: 14993 - RNA, 19 nt, Artificial Sequence
  Synthetic
caauccagaugauccuuua

SEQ ID NO: 14994 - RNA, 19 nt, Artificial Sequence
  Synthetic
gcauuugucuugauauucu

SEQ ID NO: 14995 - RNA, 19 nt, Artificial Sequence
  Synthetic
gaaguaugcgauguaauua

SEQ ID NO: 14996 - RNA, 19 nt, Artificial Sequence
  Synthetic
cacaaggaauugaaugauc

SEQ ID NO: 14997 - RNA, 19 nt, Artificial Sequence
  Synthetic
cagcacuaacuauuucaaa

SEQ ID NO: 14998 - RNA, 19 nt, Artificial Sequence
  Synthetic
gaauggacucagaaguaug

SEQ ID NO: 14999 - RNA, 19 nt, Artificial Sequence
  Synthetic
uggcagagcuggugugaga

SEQ ID NO: 15000 - RNA, 19 nt, Artificial Sequence
  Synthetic
gcucuaacaugcugaagaa

SEQ ID NO: 15001 - RNA, 19 nt, Artificial Sequence
  Synthetic
gagcauacaccgagagagu

SEQ ID NO: 15002 - RNA, 19 nt, Artificial Sequence
  Synthetic
gcuuggagcuauuaguuaa

SEQ ID NO: 15003 - RNA, 19 nt, Artificial Sequence
  Synthetic
ggaaauuggaagucaaaca

SEQ ID NO: 15004 - RNA, 19 nt, Artificial Sequence
  Synthetic
agagauaaguacaacagaa

SEQ ID NO: 15005 - RNA, 19 nt, Artificial Sequence
  Synthetic
gagauaaguacaacagaau

SEQ ID NO: 15006 - RNA, 19 nt, Artificial Sequence
  Synthetic
gcgcugaaacggauuaaua

SEQ ID NO: 15007 - RNA, 19 nt, Artificial Sequence
  Synthetic
gaacagaaaaugugaugua

SEQ ID NO: 15008 - RNA, 19 nt, Artificial Sequence
  Synthetic
gcauacaccgagagaguga

SEQ ID NO: 15009 - RNA, 19 nt, Artificial Sequence
  Synthetic
gugaggagccagacgacaa

SEQ ID NO: 15010 - RNA, 19 nt, Artificial Sequence
  Synthetic
aaauggagcauguguauua

SEQ ID NO: 15011 - RNA, 19 nt, Artificial Sequence
  Synthetic
caacagaauaucucgggaa

SEQ ID NO: 15012 - RNA, 19 nt, Artificial Sequence
  Synthetic
ccgggauaaucaagaguuu

SEQ ID NO: 15013 - RNA, 19 nt, Artificial Sequence
  Synthetic
cugaauaaaugaugcaagu

SEQ ID NO: 15014 - RNA, 19 nt, Artificial Sequence
  Synthetic
gaugagugaucaacuaaua

SEQ ID NO: 15015 - RNA, 19 nt, Artificial Sequence
  Synthetic
gauuugagguuacaugaua

SEQ ID NO: 15016 - RNA, 19 nt, Artificial Sequence
  Synthetic
cagcauuugucucgauauu

SEQ ID NO: 15017 - RNA, 19 nt, Artificial Sequence
  Synthetic
gagaauggaaauuggaagu

SEQ ID NO: 15018 - RNA, 19 nt, Artificial Sequence
  Synthetic
aucaaaggauacagcauua

SEQ ID NO: 15019 - RNA, 19 nt, Artificial Sequence
  Synthetic
gaaacggauuaauaaggaa

SEQ ID NO: 15020 - RNA, 19 nt, Artificial Sequence
  Synthetic
cagacagagauaaguacaa

SEQ ID NO: 15021 - RNA, 19 nt, Artificial Sequence
  Synthetic
gcaaguugucaauggauga

SEQ ID NO: 15022 - RNA, 19 nt, Artificial Sequence
  Synthetic
uguuagagauuugagguua

SEQ ID NO: 15023 - RNA, 19 nt, Artificial Sequence
  Synthetic
aaacagacagagauaagua

SEQ ID NO: 15024 - RNA, 19 nt, Artificial Sequence
  Synthetic
gguuacaugauaugcuuua

SEQ ID NO: 15025 - RNA, 19 nt, Artificial Sequence
  Synthetic
caucaaaggauacagcauu

SEQ ID NO: 15026 - RNA, 19 nt, Artificial Sequence
  Synthetic
ugauauguuucauuggcaa

SEQ ID NO: 15027 - RNA, 19 nt, Artificial Sequence
  Synthetic
cuaacaugcugaagaaauc

SEQ ID NO: 15028 - RNA, 19 nt, Artificial Sequence
  Synthetic
ccaagaagaaggagaguaa

SEQ ID NO: 15029 - RNA, 19 nt, Artificial Sequence
  Synthetic
cagcaaaccgagaaagaaa

SEQ ID NO: 15030 - RNA, 19 nt, Artificial Sequence
  Synthetic
gugaaaaccuguagugaaa

SEQ ID NO: 15031 - RNA, 19 nt, Artificial Sequence
  Synthetic
gagcagaacaugacagaau

SEQ ID NO: 15032 - RNA, 19 nt, Artificial Sequence
  Synthetic
gguucuauguuguggacua

SEQ ID NO: 15033 - RNA, 19 nt, Artificial Sequence
  Synthetic
ugucauuaguucugcaaua

SEQ ID NO: 15034 - RNA, 19 nt, Artificial Sequence
  Synthetic
cggaggagccagacacaaa

SEQ ID NO: 15035 - RNA, 19 nt, Artificial Sequence
  Synthetic
agagaugaguagugcguuu

SEQ ID NO: 15036 - RNA, 19 nt, Artificial Sequence
  Synthetic
gguaaagaguaggguauuu

SEQ ID NO: 15037 - RNA, 19 nt, Artificial Sequence
  Synthetic
gcuuggacauauugaaaga

SEQ ID NO: 15038 - RNA, 19 nt, Artificial Sequence
  Synthetic
agaaggagcuggcggacau

SEQ ID NO: 15039 - RNA, 19 nt, Artificial Sequence
  Synthetic
gacaguggaccaagagaua

SEQ ID NO: 15040 - RNA, 19 nt, Artificial Sequence
  Synthetic
ggaagggaacauugauauu

SEQ ID NO: 15041 - RNA, 19 nt, Artificial Sequence
  Synthetic
ccaagagaauucagaagga

SEQ ID NO: 15042 - RNA, 19 nt, Artificial Sequence
  Synthetic
gcuuguagucuguaaauuu

SEQ ID NO: 15043 - RNA, 19 nt, Artificial Sequence
  Synthetic
ugaaauaccuuaagcuguu

SEQ ID NO: 15044 - RNA, 19 nt, Artificial Sequence
  Synthetic
ugaaucaggacuugugaaa

SEQ ID NO: 15045 - RNA, 19 nt, Artificial Sequence
  Synthetic
ccauauaagagaugaguag

SEQ ID NO: 15046 - RNA, 19 nt, Artificial Sequence
  Synthetic
aaaccgagaaagaaacaaa

SEQ ID NO: 15047 - RNA, 19 nt, Artificial Sequence
  Synthetic
guaaagucagcaugagcaa

SEQ ID NO: 15048 - RNA, 19 nt, Artificial Sequence
  Synthetic
gagggugggaguugguaaa

SEQ ID NO: 15049 - RNA, 19 nt, Artificial Sequence
  Synthetic
gggaguugguaaagaguag

SEQ ID NO: 15050 - RNA, 19 nt, Artificial Sequence
  Synthetic
gagauacgcuacauaaauu

SEQ ID NO: 15051 - RNA, 19 nt, Artificial Sequence
  Synthetic
gaaaaccuguagugaaaua

SEQ ID NO: 15052 - RNA, 19 nt, Artificial Sequence
  Synthetic
gaagagagcugcuuaugau

SEQ ID NO: 15053 - RNA, 19 nt, Artificial Sequence
  Synthetic
gaguaggguauuucuauaa

SEQ ID NO: 15054 - RNA, 19 nt, Artificial Sequence
  Synthetic
gaacaugacagaauggcca

SEQ ID NO: 15055 - RNA, 19 nt, Artificial Sequence
  Synthetic
ggacaagaaucuaucauug

SEQ ID NO: 15056 - RNA, 19 nt, Artificial Sequence
  Synthetic
gagaguaaagucagcauga

SEQ ID NO: 15057 - RNA, 19 nt, Artificial Sequence
  Synthetic
ggguauuucuauaacagau

SEQ ID NO: 15058 - RNA, 19 nt, Artificial Sequence
  Synthetic
aagaacaagaggaaagaaa

SEQ ID NO: 15059 - RNA, 19 nt, Artificial Sequence
  Synthetic
auaugaaggugguguguuu

SEQ ID NO: 15060 - RNA, 19 nt, Artificial Sequence
  Synthetic
gagcagaacacgacaggau

SEQ ID NO: 15061 - RNA, 19 nt, Artificial Sequence
  Synthetic
accaagauguccagugaua

SEQ ID NO: 15062 - RNA, 19 nt, Artificial Sequence
  Synthetic
cugaagaacaagaggaaag

SEQ ID NO: 15063 - RNA, 19 nt, Artificial Sequence
  Synthetic
agaaggagcuagcugaaau

SEQ ID NO: 15064 - RNA, 19 nt, Artificial Sequence
  Synthetic
agagauaacuucaccaaga

SEQ ID NO: 15065 - RNA, 19 nt, Artificial Sequence
  Synthetic
gguaaaugcuaucaagagu

SEQ ID NO: 15066 - RNA, 19 nt, Artificial Sequence
  Synthetic
aagcauagccacucaguau

SEQ ID NO: 15067 - RNA, 19 nt, Artificial Sequence
  Synthetic
acaccaaacucucuagcaa

SEQ ID NO: 15068 - RNA, 19 nt, Artificial Sequence
  Synthetic
gccugaagaacaagaggaa

SEQ ID NO: 15069 - RNA, 19 nt, Artificial Sequence
  Synthetic
uguauuaaacccagaucua

SEQ ID NO: 15070 - RNA, 19 nt, Artificial Sequence
  Synthetic
caagagauacgcaacauaa

SEQ ID NO: 15071 - RNA, 19 nt, Artificial Sequence
  Synthetic
caauaaacaugcuccugaa

SEQ ID NO: 15072 - RNA, 19 nt, Artificial Sequence
  Synthetic
gaaggagcuagcugaaaua

SEQ ID NO: 15073 - RNA, 19 nt, Artificial Sequence
  Synthetic
ggcaaagguccgaugauga

SEQ ID NO: 15074 - RNA, 19 nt, Artificial Sequence
  Synthetic
gcuaucaagaguagaacuu

SEQ ID NO: 15075 - RNA, 19 nt, Artificial Sequence
  Synthetic
gcaaaucuuuauagccuuu

SEQ ID NO: 15076 - RNA, 19 nt, Artificial Sequence
  Synthetic
ccuaaaggagauaacauuu

SEQ ID NO: 15077 - RNA, 19 nt, Artificial Sequence
  Synthetic
cuccagagccugaagaaca

SEQ ID NO: 15078 - RNA, 19 nt, Artificial Sequence
  Synthetic
agaacaagaggaaagaaaa

SEQ ID NO: 15079 - RNA, 19 nt, Artificial Sequence
  Synthetic
guaaaugcuaucaagagua

SEQ ID NO: 15080 - RNA, 19 nt, Artificial Sequence
  Synthetic
ccaagagauacgcaacaua

SEQ ID NO: 15081 - RNA, 19 nt, Artificial Sequence
  Synthetic
gccuaaaggagauaacauu

SEQ ID NO: 15082 - RNA, 19 nt, Artificial Sequence
  Synthetic
ugaaauaacccuugauccu

SEQ ID NO: 15083 - RNA, 19 nt, Artificial Sequence
  Synthetic
ccacucaguauuugaccaa

SEQ ID NO: 15084 - RNA, 19 nt, Artificial Sequence
  Synthetic
caccaaacucucuagcaaa

SEQ ID NO: 15085 - RNA, 19 nt, Artificial Sequence
  Synthetic
uggacauccuuaaagacaa

SEQ ID NO: 15086 - RNA, 19 nt, Artificial Sequence
  Synthetic
gagaagugguuuaggaaaa

SEQ ID NO: 15087 - RNA, 19 nt, Artificial Sequence
  Synthetic
ggauagaacuugagacagu

SEQ ID NO: 15088 - RNA, 19 nt, Artificial Sequence
  Synthetic
ggaaguagucuuuggcuua

SEQ ID NO: 15089 - RNA, 19 nt, Artificial Sequence
  Synthetic
gggaagauaaguaugguua

SEQ ID NO: 15090 - RNA, 19 nt, Artificial Sequence
  Synthetic
acaaagaaauugcgaugua

SEQ ID NO: 15091 - RNA, 19 nt, Artificial Sequence
  Synthetic
cuacuuaacuucuggguuu

SEQ ID NO: 15092 - RNA, 19 nt, Artificial Sequence
  Synthetic
gcacccaaauguugauaaa

SEQ ID NO: 15093 - RNA, 19 nt, Artificial Sequence
  Synthetic
ggaagauagaaauggagaa

SEQ ID NO: 15094 - RNA, 19 nt, Artificial Sequence
  Synthetic
gguguuugauugugagaau

SEQ ID NO: 15095 - RNA, 19 nt, Artificial Sequence
  Synthetic
ggguaaaugcuuugcuauu

SEQ ID NO: 15096 - RNA, 19 nt, Artificial Sequence
  Synthetic
gauuaauguuugagcuuca

SEQ ID NO: 15097 - RNA, 19 nt, Artificial Sequence
  Synthetic
guauagaucccgucacuaa

SEQ ID NO: 15098 - RNA, 19 nt, Artificial Sequence
  Synthetic
caauaaaacaugccaguua

SEQ ID NO: 15099 - RNA, 19 nt, Artificial Sequence
  Synthetic
gagaaaugcuuuggcagaa

SEQ ID NO: 15100 - RNA, 19 nt, Artificial Sequence
  Synthetic
guggaaaccaucaugauua

SEQ ID NO: 15101 - RNA, 19 nt, Artificial Sequence
  Synthetic
gaagauagaaauggagaau

SEQ ID NO: 15102 - RNA, 19 nt, Artificial Sequence
  Synthetic
ggaacugggcugcaauaaa

SEQ ID NO: 15103 - RNA, 19 nt, Artificial Sequence
  Synthetic
gcagaagagugaaagaacu

SEQ ID NO: 15104 - RNA, 19 nt, Artificial Sequence
  Synthetic
uaauguugaugcugcgaaa

SEQ ID NO: 15105 - RNA, 19 nt, Artificial Sequence
  Synthetic
ucauguacauccacaaaua

SEQ ID NO: 15106 - RNA, 19 nt, Artificial Sequence
  Synthetic
gggaagauagaaauggaga

SEQ ID NO: 15107 - RNA, 19 nt, Artificial Sequence
  Synthetic
guacauagcacaacaugau

SEQ ID NO: 15108 - RNA, 19 nt, Artificial Sequence
  Synthetic
agagacugcuuuugaguga

SEQ ID NO: 15109 - RNA, 19 nt, Artificial Sequence
  Synthetic
gcuaguaacuucacuuauu

SEQ ID NO: 15110 - RNA, 19 nt, Artificial Sequence
  Synthetic
gcacaacaugauccggaua

SEQ ID NO: 15111 - RNA, 19 nt, Artificial Sequence
  Synthetic
gcuacaggcuuucuacuua

SEQ ID NO: 15112 - RNA, 19 nt, Artificial Sequence
  Synthetic
augcacagcuacaggcuuu

SEQ ID NO: 15113 - RNA, 19 nt, Artificial Sequence
  Synthetic
guugauuccuuaugcaaau

SEQ ID NO: 15114 - RNA, 19 nt, Artificial Sequence
  Synthetic
cagguuuaauagaugacaa

SEQ ID NO: 15115 - RNA, 19 nt, Artificial Sequence
  Synthetic
ccagagaagugguuuagga

SEQ ID NO: 15116 - RNA, 19 nt, Artificial Sequence
  Synthetic
acaaagggcuucagguaga

SEQ ID NO: 15117 - RNA, 19 nt, Artificial Sequence
  Synthetic
gaucacaaggucaggaaau

SEQ ID NO: 15118 - RNA, 19 nt, Artificial Sequence
  Synthetic
ccaugaaugaagagaacuu

SEQ ID NO: 15119 - RNA, 19 nt, Artificial Sequence
  Synthetic
ucacaaagggcuucaggua

SEQ ID NO: 15120 - RNA, 19 nt, Artificial Sequence
  Synthetic
gaaaugggguaaauagaaa

SEQ ID NO: 15121 - RNA, 19 nt, Artificial Sequence
  Synthetic
gcucugugcugguaccaaa

SEQ ID NO: 15122 - RNA, 19 nt, Artificial Sequence
  Synthetic
ugacgaaaguggagcuaac

SEQ ID NO: 15123 - RNA, 19 nt, Artificial Sequence
  Synthetic
uuacaaaccaucacacuua

SEQ ID NO: 15124 - RNA, 19 nt, Artificial Sequence
  Synthetic
ggccaaggcagguagauca

SEQ ID NO: 15125 - RNA, 19 nt, Artificial Sequence
  Synthetic
uuacaguauuccucacaaa

SEQ ID NO: 15126 - RNA, 19 nt, Artificial Sequence
  Synthetic
ccaagcagaucguccagaa

SEQ ID NO: 15127 - RNA, 19 nt, Artificial Sequence
  Synthetic
gagauuuaccugugagaug

SEQ ID NO: 15128 - RNA, 19 nt, Artificial Sequence
  Synthetic
ggcagaugcuuuucuuaua

SEQ ID NO: 15129 - RNA, 19 nt, Artificial Sequence
  Synthetic
gggagcaguucuauaagau

SEQ ID NO: 15130 - RNA, 19 nt, Artificial Sequence
  Synthetic
gcagaugcuuuucuuauaa

SEQ ID NO: 15131 - RNA, 19 nt, Artificial Sequence
  Synthetic
gcgaugaccccaugggcua

SEQ ID NO: 15132 - RNA, 19 nt, Artificial Sequence
  Synthetic
acagcuuacugcaguuuua

SEQ ID NO: 15133 - RNA, 19 nt, Artificial Sequence
  Synthetic
gucaggaaauugagaccau

SEQ ID NO: 15134 - RNA, 19 nt, Artificial Sequence
  Synthetic
uggcagagcccaaugacga

SEQ ID NO: 15135 - RNA, 19 nt, Artificial Sequence
  Synthetic
caaggcagguagaucacaa

SEQ ID NO: 15136 - RNA, 19 nt, Artificial Sequence
  Synthetic
ccacuugauuacccguuaa

SEQ ID NO: 15137 - RNA, 19 nt, Artificial Sequence
  Synthetic
gcgaugaccgggagcaguu

SEQ ID NO: 15138 - RNA, 19 nt, Artificial Sequence
  Synthetic
gaucaugggcccagaagac

SEQ ID NO: 15139 - RNA, 19 nt, Artificial Sequence
  Synthetic
ggcaacagagcgagacuca

SEQ ID NO: 15140 - RNA, 19 nt, Artificial Sequence
  Synthetic
gagcaguucuauaagauug

SEQ ID NO: 15141 - RNA, 19 nt, Artificial Sequence
  Synthetic
accaucacacuuagaaaua

SEQ ID NO: 15142 - RNA, 19 nt, Artificial Sequence
  Synthetic
caacagagcgagacucagu

SEQ ID NO: 15143 - RNA, 19 nt, Artificial Sequence
  Synthetic
ggagcaguucuauaagauu

SEQ ID NO: 15144 - RNA, 19 nt, Artificial Sequence
  Synthetic
caucacacuuagaaauacu

SEQ ID NO: 15145 - RNA, 19 nt, Artificial Sequence
  Synthetic
gguuguaccugccagacuu

SEQ ID NO: 15146 - RNA, 19 nt, Artificial Sequence
  Synthetic
ggaaauagccgcucugaua

SEQ ID NO: 15147 - RNA, 19 nt, Artificial Sequence
  Synthetic
aagaguacauccagaaaua

SEQ ID NO: 15148 - RNA, 19 nt, Artificial Sequence
  Synthetic
ggacagcacaggaggagaa

SEQ ID NO: 15149 - RNA, 19 nt, Artificial Sequence
  Synthetic
gauagguagaugugaguaa

SEQ ID NO: 15150 - RNA, 19 nt, Artificial Sequence
  Synthetic
cagaagaauacaagcagaa

SEQ ID NO: 15151 - RNA, 19 nt, Artificial Sequence
  Synthetic
gggaggacuuaaugaauuu

SEQ ID NO: 15152 - RNA, 19 nt, Artificial Sequence
  Synthetic
cggaggaggcgcugaaaga

SEQ ID NO: 15153 - RNA, 19 nt, Artificial Sequence
  Synthetic
caugagaagcagacuauaa

SEQ ID NO: 15154 - RNA, 19 nt, Artificial Sequence
  Synthetic
ggcaagaggcggauggaca

SEQ ID NO: 15155 - RNA, 19 nt, Artificial Sequence
  Synthetic
aagaugaggcccaggauau

SEQ ID NO: 15156 - RNA, 19 nt, Artificial Sequence
  Synthetic
acugaacugucgaaggaaa

SEQ ID NO: 15157 - RNA, 19 nt, Artificial Sequence
  Synthetic
uuagaaagguugcagauuu

SEQ ID NO: 15158 - RNA, 19 nt, Artificial Sequence
  Synthetic
gggagcuaauuaagaguau

SEQ ID NO: 15159 - RNA, 19 nt, Artificial Sequence
  Synthetic
ucaagcucaucgagaguaa

SEQ ID NO: 15160 - RNA, 19 nt, Artificial Sequence
  Synthetic
guauaaagcagggagcuaa

SEQ ID NO: 15161 - RNA, 19 nt, Artificial Sequence
  Synthetic
auauggaguuguaguagaa

SEQ ID NO: 15162 - RNA, 19 nt, Artificial Sequence
  Synthetic
gcagaaaauuaaagaguac

SEQ ID NO: 15163 - RNA, 19 nt, Artificial Sequence
  Synthetic
ccaauauauuugaguccuu

SEQ ID NO: 15164 - RNA, 19 nt, Artificial Sequence
  Synthetic
ccagaagaauacaagcaga

SEQ ID NO: 15165 - RNA, 19 nt, Artificial Sequence
  Synthetic
gaagaugaggcccaggaua

SEQ ID NO: 15166 - RNA, 19 nt, Artificial Sequence
  Synthetic
gaagaauacaagcagaaaa

SEQ ID NO: 15167 - RNA, 19 nt, Artificial Sequence
  Synthetic
cgcugaaagaacaggaaga

SEQ ID NO: 15168 - RNA, 19 nt, Artificial Sequence
  Synthetic
gauauggaguuguaguaga

SEQ ID NO: 15169 - RNA, 19 nt, Artificial Sequence
  Synthetic
gagaagcagacuauaauau

SEQ ID NO: 15170 - RNA, 19 nt, Artificial Sequence
  Synthetic
gagaguaaacaugagguua

SEQ ID NO: 15171 - RNA, 19 nt, Artificial Sequence
  Synthetic
gaguggaccuaccugauaa

SEQ ID NO: 15172 - RNA, 19 nt, Artificial Sequence
  Synthetic
ugggaggacuuaaugaauu

SEQ ID NO: 15173 - RNA, 19 nt, Artificial Sequence
  Synthetic
agaaauacgccacggagga

SEQ ID NO: 15174 - RNA, 19 nt, Artificial Sequence
  Synthetic
cuacugaacugucgaagga

SEQ ID NO: 15175 - RNA, 19 nt, Artificial Sequence
  Synthetic
aagaacaggaagaggguac

SEQ ID NO: 15176 - RNA, 19 nt, Artificial Sequence
  Synthetic
gaggaaagcauggaggaaa

SEQ ID NO: 15177 - RNA, 19 nt, Artificial Sequence
  Synthetic
gggaaggaggcuuguuuaa

SEQ ID NO: 15178 - RNA, 19 nt, Artificial Sequence
  Synthetic
ccaucuuagaggaggacaa

SEQ ID NO: 15179 - RNA, 19 nt, Artificial Sequence
  Synthetic
gaaaaggguccgagcacaa

SEQ ID NO: 15180 - RNA, 19 nt, Artificial Sequence
  Synthetic
gagcacaagccaagaaguu

SEQ ID NO: 15181 - RNA, 19 nt, Artificial Sequence
  Synthetic
aggaaagcauggaggaaag

SEQ ID NO: 15182 - RNA, 19 nt, Artificial Sequence
  Synthetic
ggaggaacguguggaguuu

SEQ ID NO: 15183 - RNA, 19 nt, Artificial Sequence
  Synthetic
aaucuaaaguugcuccaua

SEQ ID NO: 15184 - RNA, 19 nt, Artificial Sequence
  Synthetic
cagcucaagcagaggccua

SEQ ID NO: 15185 - RNA, 19 nt, Artificial Sequence
  Synthetic
gaauacaggaacuucuaaa

SEQ ID NO: 15186 - RNA, 19 nt, Artificial Sequence
  Synthetic
cagaguggaguacgagaaa

SEQ ID NO: 15187 - RNA, 19 nt, Artificial Sequence
  Synthetic
gcagaggccuacacgauuu

SEQ ID NO: 15188 - RNA, 19 nt, Artificial Sequence
  Synthetic
gggccugugucuuggacuu

SEQ ID NO: 15189 - RNA, 19 nt, Artificial Sequence
  Synthetic
acaggaacuucuaaaugaa

SEQ ID NO: 15190 - RNA, 19 nt, Artificial Sequence
  Synthetic
ggaucuguguuuggugaaa

SEQ ID NO: 15191 - RNA, 19 nt, Artificial Sequence
  Synthetic
cuguguugcuguuuaggua

SEQ ID NO: 15192 - RNA, 19 nt, Artificial Sequence
  Synthetic
agaggaaagcauggaggaa

SEQ ID NO: 15193 - RNA, 19 nt, Artificial Sequence
  Synthetic
gccaaaacagaguggagua

SEQ ID NO: 15194 - RNA, 19 nt, Artificial Sequence
  Synthetic
ggaggaaagaccacccauu

SEQ ID NO: 15195 - RNA, 19 nt, Artificial Sequence
  Synthetic
acagaguggaguacgagaa

SEQ ID NO: 15196 - RNA, 19 nt, Artificial Sequence
  Synthetic
gaggaaagaccacccauuu

SEQ ID NO: 15197 - RNA, 19 nt, Artificial Sequence
  Synthetic
gcccaggagaggaaagcau

SEQ ID NO: 15198 - RNA, 19 nt, Artificial Sequence
  Synthetic
ggaaggaggcuuguuuaaa

SEQ ID NO: 15199 - RNA, 19 nt, Artificial Sequence
  Synthetic
uaaaguugcuccauacaau

SEQ ID NO: 15200 - RNA, 19 nt, Artificial Sequence
  Synthetic
agaaggaagggauugguuu

SEQ ID NO: 15201 - RNA, 19 nt, Artificial Sequence
  Synthetic
gggauugguuuggcaagaa

SEQ ID NO: 15202 - RNA, 19 nt, Artificial Sequence
  Synthetic
uggaggaacguguggaguu

SEQ ID NO: 15203 - RNA, 19 nt, Artificial Sequence
  Synthetic
uauccaagacccagcucaa

SEQ ID NO: 15204 - RNA, 19 nt, Artificial Sequence
  Synthetic
ucuuagaggaggacaagga

SEQ ID NO: 15205 - RNA, 19 nt, Artificial Sequence
  Synthetic
gagaggaaagcauggagga

SEQ ID NO: 15206 - RNA, 19 nt, Artificial Sequence
  Synthetic
uguagaauguauagggaua

SEQ ID NO: 15207 - RNA, 19 nt, Artificial Sequence
  Synthetic
gaguauaaggacagcauua

SEQ ID NO: 15208 - RNA, 19 nt, Artificial Sequence
  Synthetic
aagaagagcacuugccaaa

SEQ ID NO: 15209 - RNA, 19 nt, Artificial Sequence
  Synthetic
gcaaauaagcuuuaaggca

SEQ ID NO: 15210 - RNA, 19 nt, Artificial Sequence
  Synthetic
gcuuuaaggcagaagucaa

SEQ ID NO: 15211 - RNA, 19 nt, Artificial Sequence
  Synthetic
cagccuucguggaguauaa

SEQ ID NO: 15212 - RNA, 19 nt, Artificial Sequence
  Synthetic
ugaaagaagcggcagaauu

SEQ ID NO: 15213 - RNA, 19 nt, Artificial Sequence
  Synthetic
gagaauuacuaguuacuca

SEQ ID NO: 15214 - RNA, 19 nt, Artificial Sequence
  Synthetic
ggguauaaucuaagaauug

SEQ ID NO: 15215 - RNA, 19 nt, Artificial Sequence
  Synthetic
ccaaagaacuggcuaggca

SEQ ID NO: 15216 - RNA, 19 nt, Artificial Sequence
  Synthetic
gaauauaucuggcaaacga

SEQ ID NO: 15217 - RNA, 19 nt, Artificial Sequence
  Synthetic
guauagggauagaagaguu

SEQ ID NO: 15218 - RNA, 19 nt, Artificial Sequence
  Synthetic
cgacgaauauaucuggcaa

SEQ ID NO: 15219 - RNA, 19 nt, Artificial Sequence
  Synthetic
aaauaagcuuuaaggcaga

SEQ ID NO: 15220 - RNA, 19 nt, Artificial Sequence
  Synthetic
cuauauugcccuuugaaau

SEQ ID NO: 15221 - RNA, 19 nt, Artificial Sequence
  Synthetic
uaggagauguacuggaauu

SEQ ID NO: 15222 - RNA, 19 nt, Artificial Sequence
  Synthetic
cagagaagguugucuacuu

SEQ ID NO: 15223 - RNA, 19 nt, Artificial Sequence
  Synthetic
cagcagagucagagaaggu

SEQ ID NO: 15224 - RNA, 19 nt, Artificial Sequence
  Synthetic
cauaggagauguacuggaa

SEQ ID NO: 15225 - RNA, 19 nt, Artificial Sequence
  Synthetic
ccuaaacauucuucaguga

SEQ ID NO: 15226 - RNA, 19 nt, Artificial Sequence
  Synthetic
gaauggcacuucacgguua

SEQ ID NO: 15227 - RNA, 19 nt, Artificial Sequence
  Synthetic
aagcaaaacuccucaagua

SEQ ID NO: 15228 - RNA, 19 nt, Artificial Sequence
  Synthetic
gucaaacauuuaugaggaa

SEQ ID NO: 15229 - RNA, 19 nt, Artificial Sequence
  Synthetic
agucagagaagguugucua

SEQ ID NO: 15230 - RNA, 19 nt, Artificial Sequence
  Synthetic
ccauagguucucuagauua

SEQ ID NO: 15231 - RNA, 19 nt, Artificial Sequence
  Synthetic
gaaagaagcggcagaauug

SEQ ID NO: 15232 - RNA, 19 nt, Artificial Sequence
  Synthetic
caaauaagcuuuaaggcag

SEQ ID NO: 15233 - RNA, 19 nt, Artificial Sequence
  Synthetic
ggcuaauggucgauuugaa

SEQ ID NO: 15234 - RNA, 19 nt, Artificial Sequence
  Synthetic
uggcagccuucguggagua

SEQ ID NO: 15235 - RNA, 19 nt, Artificial Sequence
  Synthetic
cuuuaaggcagaagucaau

SEQ ID NO: 15236 - RNA, 19 nt, Artificial Sequence
  Synthetic
acagaaagcacaagacgaa

SEQ ID NO: 15237 - RNA, 19 nt, Artificial Sequence
  Synthetic
gcuccuagguuuagcuuuu

SEQ ID NO: 15238 - RNA, 19 nt, Artificial Sequence
  Synthetic
ucagugaguugaaaggaaa

SEQ ID NO: 15239 - RNA, 19 nt, Artificial Sequence
  Synthetic
cugaagucguggaggagau

SEQ ID NO: 15240 - RNA, 19 nt, Artificial Sequence
  Synthetic
guugaaaggaaauguguuu

SEQ ID NO: 15241 - RNA, 19 nt, Artificial Sequence
  Synthetic
uauuagauguggucacuua

SEQ ID NO: 15242 - RNA, 19 nt, Artificial Sequence
  Synthetic
acaaauguguuuacaguca

SEQ ID NO: 15243 - RNA, 19 nt, Artificial Sequence
  Synthetic
guauagagacgucggacuu

SEQ ID NO: 15244 - RNA, 19 nt, Artificial Sequence
  Synthetic
ccaccaggcuccuagguuu

SEQ ID NO: 15245 - RNA, 19 nt, Artificial Sequence
  Synthetic
guggaggagauuaaacaaa

SEQ ID NO: 15246 - RNA, 19 nt, Artificial Sequence
  Synthetic
cgaacuuguuugugauagu

SEQ ID NO: 15247 - RNA, 19 nt, Artificial Sequence
  Synthetic
gugcuggauuuguagcuua

SEQ ID NO: 15248 - RNA, 19 nt, Artificial Sequence
  Synthetic
aagucguggaggagauuaa

SEQ ID NO: 15249 - RNA, 19 nt, Artificial Sequence
  Synthetic
cagagaauuuccuuucaaa

SEQ ID NO: 15250 - RNA, 19 nt, Artificial Sequence
  Synthetic
gugcagaguuuagcauuua

SEQ ID NO: 15251 - RNA, 19 nt, Artificial Sequence
  Synthetic
acgggagguuuaagugcaa

SEQ ID NO: 15252 - RNA, 19 nt, Artificial Sequence
  Synthetic
uggaggagauuaaacaaaa

SEQ ID NO: 15253 - RNA, 19 nt, Artificial Sequence
  Synthetic
agugcagaguuuagcauuu

SEQ ID NO: 15254 - RNA, 19 nt, Artificial Sequence
  Synthetic
ggguuuggucucagcauuu

SEQ ID NO: 15255 - RNA, 19 nt, Artificial Sequence
  Synthetic
uggcuauuaucauggaaaa

SEQ ID NO: 15256 - RNA, 19 nt, Artificial Sequence
  Synthetic
caccaggcuccuagguuua

SEQ ID NO: 15257 - RNA, 19 nt, Artificial Sequence
  Synthetic
ugagcuucaugguggagaa

SEQ ID NO: 15258 - RNA, 19 nt, Artificial Sequence
  Synthetic
gcacaagacgaacucagua

SEQ ID NO: 15259 - RNA, 19 nt, Artificial Sequence
  Synthetic
ggccuugugugcuggauuu

SEQ ID NO: 15260 - RNA, 19 nt, Artificial Sequence
  Synthetic
guggcuauuaucauggaaa

SEQ ID NO: 15261 - RNA, 19 nt, Artificial Sequence
  Synthetic
agacgaacucaguagcaga

SEQ ID NO: 15262 - RNA, 19 nt, Artificial Sequence
  Synthetic
guguuuacagucagaauga

SEQ ID NO: 15263 - RNA, 19 nt, Artificial Sequence
  Synthetic
uuaugaagguggcuauuau

SEQ ID NO: 15264 - RNA, 19 nt, Artificial Sequence
  Synthetic
ccagagaauuuccuuucaa

SEQ ID NO: 15265 - RNA, 19 nt, Artificial Sequence
  Synthetic
cccaguaucuauaugauca

SEQ ID NO: 15266 - RNA, 19 nt, Artificial Sequence
  Synthetic
ccucaguucuugugugaaa

SEQ ID NO: 15267 - RNA, 19 nt, Artificial Sequence
  Synthetic
ugaaggagcuugaagaaau

SEQ ID NO: 15268 - RNA, 19 nt, Artificial Sequence
  Synthetic
uaagaaugcugaagaguuu

SEQ ID NO: 15269 - RNA, 19 nt, Artificial Sequence
  Synthetic
gcugaagaguuuacaaaga

SEQ ID NO: 15270 - RNA, 19 nt, Artificial Sequence
  Synthetic
ugaugaaucucgccagaaa

SEQ ID NO: 15271 - RNA, 19 nt, Artificial Sequence
  Synthetic
ccgcaaaugugggaugaaa

SEQ ID NO: 15272 - RNA, 19 nt, Artificial Sequence
  Synthetic
ccagaauguccguuugaaa

SEQ ID NO: 15273 - RNA, 19 nt, Artificial Sequence
  Synthetic
cugaagaguuuacaaagaa

SEQ ID NO: 15274 - RNA, 19 nt, Artificial Sequence
  Synthetic
gaaaagugaugauggauuu

SEQ ID NO: 15275 - RNA, 19 nt, Artificial Sequence
  Synthetic
acaaagaaauauggggaaa

SEQ ID NO: 15276 - RNA, 19 nt, Artificial Sequence
  Synthetic
gaugaaggagcuugaagaa

SEQ ID NO: 15277 - RNA, 19 nt, Artificial Sequence
  Synthetic
guggagaagaugacuuaaa

SEQ ID NO: 15278 - RNA, 19 nt, Artificial Sequence
  Synthetic
gacuagauccuguggagaa

SEQ ID NO: 15279 - RNA, 19 nt, Artificial Sequence
  Synthetic
cagagaagcccuauaauca

SEQ ID NO: 15280 - RNA, 19 nt, Artificial Sequence
  Synthetic
gcacagagaagcccuauaa

SEQ ID NO: 15281 - RNA, 19 nt, Artificial Sequence
  Synthetic
ccaccgaagaucacauuua

SEQ ID NO: 15282 - RNA, 19 nt, Artificial Sequence
  Synthetic
gcagaaaagugaugaugga

SEQ ID NO: 15283 - RNA, 19 nt, Artificial Sequence
  Synthetic
ccucauagcacuggugaau

SEQ ID NO: 15284 - RNA, 19 nt, Artificial Sequence
  Synthetic
guaagaaugcugaagaguu

SEQ ID NO: 15285 - RNA, 19 nt, Artificial Sequence
  Synthetic
ugaccuagcugaagaauac

SEQ ID NO: 15286 - RNA, 19 nt, Artificial Sequence
  Synthetic
ccuucagaaucgaaaucaa

SEQ ID NO: 15287 - RNA, 19 nt, Artificial Sequence
  Synthetic
gagaagaugacuuaaacuu

SEQ ID NO: 15288 - RNA, 19 nt, Artificial Sequence
  Synthetic
gcaggaggcugaugaagga

SEQ ID NO: 15289 - RNA, 19 nt, Artificial Sequence
  Synthetic
gccaguaauuagugccgaa

SEQ ID NO: 15290 - RNA, 19 nt, Artificial Sequence
  Synthetic
gggcugaccuagcugaaga

SEQ ID NO: 15291 - RNA, 19 nt, Artificial Sequence
  Synthetic
acccaaacaucgacgaaaa

SEQ ID NO: 15292 - RNA, 19 nt, Artificial Sequence
  Synthetic
aagcaggacucuguggaaa

SEQ ID NO: 15293 - RNA, 19 nt, Artificial Sequence
  Synthetic
gcuugaagaaauccgcaaa

SEQ ID NO: 15294 - RNA, 19 nt, Artificial Sequence
  Synthetic
ccagguugaugaagcuaau

SEQ ID NO: 15295 - RNA, 19 nt, Artificial Sequence
  Synthetic
gguugaugaagcuaauuua

SEQ ID NO: 15296 - RNA, 19 nt, Artificial Sequence
  Synthetic
ggacgagaacggacagauu

SEQ ID NO: 15297 - RNA, 19 nt, Artificial Sequence
  Synthetic
ccucagacugugaaguaua

SEQ ID NO: 15298 - RNA, 19 nt, Artificial Sequence
  Synthetic
gugaauagaccgaauauca

SEQ ID NO: 15299 - RNA, 19 nt, Artificial Sequence
  Synthetic
ugaaggagcuggaggaucu

SEQ ID NO: 15300 - RNA, 19 nt, Artificial Sequence
  Synthetic
cuucuuagguuguuaguca

SEQ ID NO: 15301 - RNA, 19 nt, Artificial Sequence
  Synthetic
gaaagaaugccgaagaguu

SEQ ID NO: 15302 - RNA, 19 nt, Artificial Sequence
  Synthetic
aaaccauguucuugcuuaa

SEQ ID NO: 15303 - RNA, 19 nt, Artificial Sequence
  Synthetic
gaguuuaaguuugcaguua

SEQ ID NO: 15304 - RNA, 19 nt, Artificial Sequence
  Synthetic
gguuguuagucauuaguuu

SEQ ID NO: 15305 - RNA, 19 nt, Artificial Sequence
  Synthetic
gcacuggauccucggcaua

SEQ ID NO: 15306 - RNA, 19 nt, Artificial Sequence
  Synthetic
agugagaacuggaagccuu

SEQ ID NO: 15307 - RNA, 19 nt, Artificial Sequence
  Synthetic
gaguguguguguuguguau

SEQ ID NO: 15308 - RNA, 19 nt, Artificial Sequence
  Synthetic
gucacaaucugaagaauca

SEQ ID NO: 15309 - RNA, 19 nt, Artificial Sequence
  Synthetic
auccggagcuguucagaaa

SEQ ID NO: 15310 - RNA, 19 nt, Artificial Sequence
  Synthetic
ugaugggaauauacagauu

SEQ ID NO: 15311 - RNA, 19 nt, Artificial Sequence
  Synthetic
ccggagcuguucagaaaga

SEQ ID NO: 15312 - RNA, 19 nt, Artificial Sequence
  Synthetic
gcuggugaauagaccgaau

SEQ ID NO: 15313 - RNA, 19 nt, Artificial Sequence
  Synthetic
ucagaaagaaugccgaaga

SEQ ID NO: 15314 - RNA, 19 nt, Artificial Sequence
  Synthetic
guucagaaagaaugccgaa

SEQ ID NO: 15315 - RNA, 19 nt, Artificial Sequence
  Synthetic
guuuaaguuugcaguuaca

SEQ ID NO: 15316 - RNA, 19 nt, Artificial Sequence
  Synthetic
ccaagccacugaugggaau

SEQ ID NO: 15317 - RNA, 19 nt, Artificial Sequence
  Synthetic
aaagaaugccgaagaguuc

SEQ ID NO: 15318 - RNA, 19 nt, Artificial Sequence
  Synthetic
ggccucagacugugaagua

SEQ ID NO: 15319 - RNA, 19 nt, Artificial Sequence
  Synthetic
ugaucaaauucacaaccaa

SEQ ID NO: 15320 - RNA, 19 nt, Artificial Sequence
  Synthetic
caucaucagcagugagaac

SEQ ID NO: 15321 - RNA, 19 nt, Artificial Sequence
  Synthetic
gcaugcgaguggugaagga

SEQ ID NO: 15322 - RNA, 19 nt, Artificial Sequence
  Synthetic
ggagcuguucagaaagaau

SEQ ID NO: 15323 - RNA, 19 nt, Artificial Sequence
  Synthetic
gaaaccauguucuugcuua

SEQ ID NO: 15324 - RNA, 19 nt, Artificial Sequence
  Synthetic
ggaccaggccucagacugu

SEQ ID NO: 15325 - RNA, 19 nt, Artificial Sequence
  Synthetic
ucaaugugcuggugaauag

SEQ ID NO: 15326 - RNA, 19 nt, Artificial Sequence
  Synthetic
acauugaccucgagggcaa

SEQ ID NO: 15327 - RNA, 19 nt, Artificial Sequence
  Synthetic
cagagguccugcagaacaa

SEQ ID NO: 15328 - RNA, 19 nt, Artificial Sequence
  Synthetic
ccgaggacccacugaacaa

SEQ ID NO: 15329 - RNA, 19 nt, Artificial Sequence
  Synthetic
ggaaguuuguguucaguuu

SEQ ID NO: 15330 - RNA, 19 nt, Artificial Sequence
  Synthetic
aggugaagugugagacaau

SEQ ID NO: 15331 - RNA, 19 nt, Artificial Sequence
  Synthetic
cuacaagagugggaaguuu

SEQ ID NO: 15332 - RNA, 19 nt, Artificial Sequence
  Synthetic
gaaauaggguuggcgcaua

SEQ ID NO: 15333 - RNA, 19 nt, Artificial Sequence
  Synthetic
ggauccagaaggacauaaa

SEQ ID NO: 15334 - RNA, 19 nt, Artificial Sequence
  Synthetic
cugcccaagacgugugaua

SEQ ID NO: 15335 - RNA, 19 nt, Artificial Sequence
  Synthetic
uuaaggugggccaggguua

SEQ ID NO: 15336 - RNA, 19 nt, Artificial Sequence
  Synthetic
agaagaaggaggaggaguc

SEQ ID NO: 15337 - RNA, 19 nt, Artificial Sequence
  Synthetic
gaugagggcuucuacaaga

SEQ ID NO: 15338 - RNA, 19 nt, Artificial Sequence
  Synthetic
agccaguccuuacgauaaa

SEQ ID NO: 15339 - RNA, 19 nt, Artificial Sequence
  Synthetic
caaggugaagugugagaca

SEQ ID NO: 15340 - RNA, 19 nt, Artificial Sequence
  Synthetic
aggacauaaacgagcugaa

SEQ ID NO: 15341 - RNA, 19 nt, Artificial Sequence
  Synthetic
cugcggauccagaaggaca

SEQ ID NO: 15342 - RNA, 19 nt, Artificial Sequence
  Synthetic
aagccaguccuuacgauaa

SEQ ID NO: 15343 - RNA, 19 nt, Artificial Sequence
  Synthetic
gaagccaguccuuacgaua

SEQ ID NO: 15344 - RNA, 19 nt, Artificial Sequence
  Synthetic
gagcugaaccugcccaaga

SEQ ID NO: 15345 - RNA, 19 nt, Artificial Sequence
  Synthetic
cagacgaccuccucaacuu

SEQ ID NO: 15346 - RNA, 19 nt, Artificial Sequence
  Synthetic
gcaccaagggcagcagcaa

SEQ ID NO: 15347 - RNA, 19 nt, Artificial Sequence
  Synthetic
gccucaacauccucagaga

SEQ ID NO: 15348 - RNA, 19 nt, Artificial Sequence
  Synthetic
ugaagcagcagaagaagga

SEQ ID NO: 15349 - RNA, 19 nt, Artificial Sequence
  Synthetic
gcccaagacgugugauauc

SEQ ID NO: 15350 - RNA, 19 nt, Artificial Sequence
  Synthetic
gauaucagcuucucagauc

SEQ ID NO: 15351 - RNA, 19 nt, Artificial Sequence
  Synthetic
uaauuuauggccugcagua

SEQ ID NO: 15352 - RNA, 19 nt, Artificial Sequence
  Synthetic
aaauaggguuggcgcauac

SEQ ID NO: 15353 - RNA, 19 nt, Artificial Sequence
  Synthetic
ggacauaaacgagcugaac

SEQ ID NO: 15354 - RNA, 19 nt, Artificial Sequence
  Synthetic
uuuaacaccaggcuaacua

SEQ ID NO: 15355 - RNA, 19 nt, Artificial Sequence
  Synthetic
uaacaccaggcuaacuaaa

SEQ ID NO: 15356 - RNA, 19 nt, Artificial Sequence
  Synthetic
caacgaagcccaagccaua

SEQ ID NO: 15357 - RNA, 19 nt, Artificial Sequence
  Synthetic
ggacacagucuuagaaaca

SEQ ID NO: 15358 - RNA, 19 nt, Artificial Sequence
  Synthetic
ggcuauaugccaugaauaa

SEQ ID NO: 15359 - RNA, 19 nt, Artificial Sequence
  Synthetic
agacaaguugggaagaaua

SEQ ID NO: 15360 - RNA, 19 nt, Artificial Sequence
  Synthetic
gaagguaguugucagguua

SEQ ID NO: 15361 - RNA, 19 nt, Artificial Sequence
  Synthetic
caucuggauuguugugaaa

SEQ ID NO: 15362 - RNA, 19 nt, Artificial Sequence
  Synthetic
cauccugguuuaaguauaa

SEQ ID NO: 15363 - RNA, 19 nt, Artificial Sequence
  Synthetic
gggagguaguuuaauuuua

SEQ ID NO: 15364 - RNA, 19 nt, Artificial Sequence
  Synthetic
ccgaaccagaugagagcaa

SEQ ID NO: 15365 - RNA, 19 nt, Artificial Sequence
  Synthetic
cagaugauccauuagcaaa

SEQ ID NO: 15366 - RNA, 19 nt, Artificial Sequence
  Synthetic
ggacuaggcuauaugccau

SEQ ID NO: 15367 - RNA, 19 nt, Artificial Sequence
  Synthetic
guagacaaguugggaagaa

SEQ ID NO: 15368 - RNA, 19 nt, Artificial Sequence
  Synthetic
uauaaagcacugugaauga

SEQ ID NO: 15369 - RNA, 19 nt, Artificial Sequence
  Synthetic
gcaucaaagccgaaccaga

SEQ ID NO: 15370 - RNA, 19 nt, Artificial Sequence
  Synthetic
caucaaagccgaaccagau

SEQ ID NO: 15371 - RNA, 19 nt, Artificial Sequence
  Synthetic
gggagggacuuuuaaacuu

SEQ ID NO: 15372 - RNA, 19 nt, Artificial Sequence
  Synthetic
gggaagaauauguuuagau

SEQ ID NO: 15373 - RNA, 19 nt, Artificial Sequence
  Synthetic
acacagucuuagaaacauu

SEQ ID NO: 15374 - RNA, 19 nt, Artificial Sequence
  Synthetic
ucuggaaacuucuguaaau

SEQ ID NO: 15375 - RNA, 19 nt, Artificial Sequence
  Synthetic
ccagaugauccauuagcaa

SEQ ID NO: 15376 - RNA, 19 nt, Artificial Sequence
  Synthetic
cuaauaacauugcugucaa

SEQ ID NO: 15377 - RNA, 19 nt, Artificial Sequence
  Synthetic
agcccaagccauagaaaca

SEQ ID NO: 15378 - RNA, 19 nt, Artificial Sequence
  Synthetic
caaaugauguagcggagca

SEQ ID NO: 15379 - RNA, 19 nt, Artificial Sequence
  Synthetic
ccauccugguuuaaguaua

SEQ ID NO: 15380 - RNA, 19 nt, Artificial Sequence
  Synthetic
gaucuaauugcauugguua

SEQ ID NO: 15381 - RNA, 19 nt, Artificial Sequence
  Synthetic
gagcagaggcuagaaguau

SEQ ID NO: 15382 - RNA, 19 nt, Artificial Sequence
  Synthetic
uaaccaggucuuuagaaua

SEQ ID NO: 15383 - RNA, 19 nt, Artificial Sequence
  Synthetic
agaugauccauuagcaaau

SEQ ID NO: 15384 - RNA, 19 nt, Artificial Sequence
  Synthetic
cgcaggaucaucaaggaaa

SEQ ID NO: 15385 - RNA, 19 nt, Artificial Sequence
  Synthetic
aaccaggucuuuagaauau

SEQ ID NO: 15386 - RNA, 19 nt, Artificial Sequence
  Synthetic
augaaggagcucagggaua

SEQ ID NO: 15387 - RNA, 19 nt, Artificial Sequence
  Synthetic
cagaagacuuagaucacua

SEQ ID NO: 15388 - RNA, 19 nt, Artificial Sequence
  Synthetic
ccauagagucagugaucau

SEQ ID NO: 15389 - RNA, 19 nt, Artificial Sequence
  Synthetic
augaaaugaaagaggaaga

SEQ ID NO: 15390 - RNA, 19 nt, Artificial Sequence
  Synthetic
cuaugaaaugaaagaggaa

SEQ ID NO: 15391 - RNA, 19 nt, Artificial Sequence
  Synthetic
ccagauccucaaagagaaa

SEQ ID NO: 15392 - RNA, 19 nt, Artificial Sequence
  Synthetic
uggagaggcugguggacau

SEQ ID NO: 15393 - RNA, 19 nt, Artificial Sequence
  Synthetic
ccucaaagagaaagaagga

SEQ ID NO: 15394 - RNA, 19 nt, Artificial Sequence
  Synthetic
aagaugaagaugaggagau

SEQ ID NO: 15395 - RNA, 19 nt, Artificial Sequence
  Synthetic
gcugguggacauaaagaaa

SEQ ID NO: 15396 - RNA, 19 nt, Artificial Sequence
  Synthetic
agaugauggcauuggaaaa

SEQ ID NO: 15397 - RNA, 19 nt, Artificial Sequence
  Synthetic
cuuaaauggugcagugucu

SEQ ID NO: 15398 - RNA, 19 nt, Artificial Sequence
  Synthetic
ggaaauggagagacaguaa

SEQ ID NO: 15399 - RNA, 19 nt, Artificial Sequence
  Synthetic
ccacaacccuggcggaaua

SEQ ID NO: 15400 - RNA, 19 nt, Artificial Sequence
  Synthetic
caguaaaggaaaagacaaa

SEQ ID NO: 15401 - RNA, 19 nt, Artificial Sequence
  Synthetic
cgacauugaugaugaagau

SEQ ID NO: 15402 - RNA, 19 nt, Artificial Sequence
  Synthetic
ggagagacaguaaaggaaa

SEQ ID NO: 15403 - RNA, 19 nt, Artificial Sequence
  Synthetic
ggaucgaaagccugaaaua

SEQ ID NO: 15404 - RNA, 19 nt, Artificial Sequence
  Synthetic
gcauauacuggguagcaaa

SEQ ID NO: 15405 - RNA, 19 nt, Artificial Sequence
  Synthetic
gugcuaagccugaugaaau

SEQ ID NO: 15406 - RNA, 19 nt, Artificial Sequence
  Synthetic
agacaaagaauaugcugaa

SEQ ID NO: 15407 - RNA, 19 nt, Artificial Sequence
  Synthetic
aggaagaugccgacuguua

SEQ ID NO: 15408 - RNA, 19 nt, Artificial Sequence
  Synthetic
ccacuaaggccgaagcaga

SEQ ID NO: 15409 - RNA, 19 nt, Artificial Sequence
  Synthetic
aagaugaggaggaggaaga

SEQ ID NO: 15410 - RNA, 19 nt, Artificial Sequence
  Synthetic
gagagacaguaaaggaaaa

SEQ ID NO: 15411 - RNA, 19 nt, Artificial Sequence
  Synthetic
guucacaagugcugcauau

SEQ ID NO: 15412 - RNA, 19 nt, Artificial Sequence
  Synthetic
ucaguuauguucaggaaau

SEQ ID NO: 15413 - RNA, 19 nt, Artificial Sequence
  Synthetic
ucugaaagguggaauccua

SEQ ID NO: 15414 - RNA, 19 nt, Artificial Sequence
  Synthetic
agguuuagcugcucauuua

SEQ ID NO: 15415 - RNA, 19 nt, Artificial Sequence
  Synthetic
gaccuuuaauggagagaga

SEQ ID NO: 15416 - RNA, 19 nt, Artificial Sequence
  Synthetic
gaucgaaagccugaaauaa

SEQ ID NO: 15417 - RNA, 19 nt, Artificial Sequence
  Synthetic
caucagggacuuugugcua

SEQ ID NO: 15418 - RNA, 19 nt, Artificial Sequence
  Synthetic
gaguaacccuccacagaau

SEQ ID NO: 15419 - RNA, 19 nt, Artificial Sequence
  Synthetic
gcggaauacugcaucaaaa

SEQ ID NO: 15420 - RNA, 19 nt, Artificial Sequence
  Synthetic
aucgaaagccugaaauaaa

SEQ ID NO: 15421 - RNA, 19 nt, Artificial Sequence
  Synthetic
ucgaaagccugaaauaaau

SEQ ID NO: 15422 - RNA, 19 nt, Artificial Sequence
  Synthetic
uuaugagaauggagaugua

SEQ ID NO: 15423 - RNA, 19 nt, Artificial Sequence
  Synthetic
ccuucagauucuugaccaa

SEQ ID NO: 15424 - RNA, 19 nt, Artificial Sequence
  Synthetic
guggaauccuacucagaau

SEQ ID NO: 15425 - RNA, 19 nt, Artificial Sequence
  Synthetic
ccaugaaaccaucguaaca

SEQ ID NO: 15426 - RNA, 19 nt, Artificial Sequence
  Synthetic
gcugaaauuauuaggaaac

SEQ ID NO: 15427 - RNA, 19 nt, Artificial Sequence
  Synthetic
acagaauguucacagcaaa

SEQ ID NO: 15428 - RNA, 19 nt, Artificial Sequence
  Synthetic
uggagaacuacgaggagua

SEQ ID NO: 15429 - RNA, 19 nt, Artificial Sequence
  Synthetic
gcaucaaggucuuucccaa

SEQ ID NO: 15430 - RNA, 19 nt, Artificial Sequence
  Synthetic
ccaagaagcaugcuggcga

SEQ ID NO: 15431 - RNA, 19 nt, Artificial Sequence
  Synthetic
ucaacgugcucaagaggga

SEQ ID NO: 15432 - RNA, 19 nt, Artificial Sequence
  Synthetic
gcugaaauguggaugcaua

SEQ ID NO: 15433 - RNA, 19 nt, Artificial Sequence
  Synthetic
gguugaacuuggagaaaga

SEQ ID NO: 15434 - RNA, 19 nt, Artificial Sequence
  Synthetic
ggacaguguuacagcaauu

SEQ ID NO: 15435 - RNA, 19 nt, Artificial Sequence
  Synthetic
ccagaaaggaguaggagau

SEQ ID NO: 15436 - RNA, 19 nt, Artificial Sequence
  Synthetic
agaauagucaccaggguua

SEQ ID NO: 15437 - RNA, 19 nt, Artificial Sequence
  Synthetic
gagaaagaccgcaugaaga

SEQ ID NO: 15438 - RNA, 19 nt, Artificial Sequence
  Synthetic
ucaaaguaccggaaaggaa

SEQ ID NO: 15439 - RNA, 19 nt, Artificial Sequence
  Synthetic
caucaaaguuguccugcaa

SEQ ID NO: 15440 - RNA, 19 nt, Artificial Sequence
  Synthetic
ccauaucagugcuagcaaa

SEQ ID NO: 15441 - RNA, 19 nt, Artificial Sequence
  Synthetic
gcaacuaucaagucugaaa

SEQ ID NO: 15442 - RNA, 19 nt, Artificial Sequence
  Synthetic
cagaauucauauagcauca

SEQ ID NO: 15443 - RNA, 19 nt, Artificial Sequence
  Synthetic
aauagaauguggaccuaaa

SEQ ID NO: 15444 - RNA, 19 nt, Artificial Sequence
  Synthetic
aagcaaacugagugaugaa

SEQ ID NO: 15445 - RNA, 19 nt, Artificial Sequence
  Synthetic
cagcagggauuaagaagga

SEQ ID NO: 15446 - RNA, 19 nt, Artificial Sequence
  Synthetic
guggaugcauaccgaaaua

SEQ ID NO: 15447 - RNA, 19 nt, Artificial Sequence
  Synthetic
gccagaagccaucagguaa

SEQ ID NO: 15448 - RNA, 19 nt, Artificial Sequence
  Synthetic
ggcuugaccuccuggcaaa

SEQ ID NO: 15449 - RNA, 19 nt, Artificial Sequence
  Synthetic
agaaagaccgcaugaagau

SEQ ID NO: 15450 - RNA, 19 nt, Artificial Sequence
  Synthetic
ggaugcauaccgaaauaaa

SEQ ID NO: 15451 - RNA, 19 nt, Artificial Sequence
  Synthetic
ggccagaagccaucaggua

SEQ ID NO: 15452 - RNA, 19 nt, Artificial Sequence
  Synthetic
acugagugaugaaggaaga

SEQ ID NO: 15453 - RNA, 19 nt, Artificial Sequence
  Synthetic
ccgaauauacagccuuaaa

SEQ ID NO: 15454 - RNA, 19 nt, Artificial Sequence
  Synthetic
caaacugagugaugaagga

SEQ ID NO: 15455 - RNA, 19 nt, Artificial Sequence
  Synthetic
ggaucaagaaagucuauuu

SEQ ID NO: 15456 - RNA, 19 nt, Artificial Sequence
  Synthetic
cgucuuaccugaagucaca

SEQ ID NO: 15457 - RNA, 19 nt, Artificial Sequence
  Synthetic
gaguagaugugaagguuuc

SEQ ID NO: 15458 - RNA, 19 nt, Artificial Sequence
  Synthetic
ucaaaguuguccugcaaga

SEQ ID NO: 15459 - RNA, 19 nt, Artificial Sequence
  Synthetic
ccugaagucacaaagcaaa

SEQ ID NO: 15460 - RNA, 19 nt, Artificial Sequence
  Synthetic
gccgaagcauagauuguaa

SEQ ID NO: 15461 - RNA, 19 nt, Artificial Sequence
  Synthetic
agacaugacacuuacaaga

SEQ ID NO: 15462 - RNA, 19 nt, Artificial Sequence
  Synthetic
ccuaaugaugucuaaagaa

SEQ ID NO: 15463 - RNA, 19 nt, Artificial Sequence
  Synthetic
gccuaaugaugucuaaaga

SEQ ID NO: 15464 - RNA, 19 nt, Artificial Sequence
  Synthetic
caaaauggcagaauucaua

SEQ ID NO: 15465 - RNA, 19 nt, Artificial Sequence
  Synthetic
gguggacccaagagccaua

SEQ ID NO: 15466 - RNA, 19 nt, Artificial Sequence
  Synthetic
ucauauagcaucaaaguug

SEQ ID NO: 15467 - RNA, 19 nt, Artificial Sequence
  Synthetic
uggcagaauucauauagca

SEQ ID NO: 15468 - RNA, 19 nt, Artificial Sequence
  Synthetic
ggaccuaaauacccagaag

SEQ ID NO: 15469 - RNA, 19 nt, Artificial Sequence
  Synthetic
uagaauguggaccuaaaua

SEQ ID NO: 15470 - RNA, 19 nt, Artificial Sequence
  Synthetic
ugaauggaguaaauaguuc

SEQ ID NO: 15471 - RNA, 19 nt, Artificial Sequence
  Synthetic
cauauagcaucaaaguugu

SEQ ID NO: 15472 - RNA, 19 nt, Artificial Sequence
  Synthetic
ggaguaaauaguucuaaug

SEQ ID NO: 15473 - RNA, 19 nt, Artificial Sequence
  Synthetic
gaauggaguaaauaguucu

SEQ ID NO: 15474 - RNA, 19 nt, Artificial Sequence
  Synthetic
aaaauagaauguggaccua

SEQ ID NO: 15475 - RNA, 19 nt, Artificial Sequence
  Synthetic
ggacccaagagccauauca

SEQ ID NO: 15476 - RNA, 19 nt, Artificial Sequence
  Synthetic
uaucagugcuagcaaaaug

SEQ ID NO: 15477 - RNA, 19 nt, Artificial Sequence
  Synthetic
gaauguggaccuaaauacc

SEQ ID NO: 15478 - RNA, 19 nt, Artificial Sequence
  Synthetic
gaguaaauaguucuaaugg

SEQ ID NO: 15479 - RNA, 19 nt, Artificial Sequence
  Synthetic
gacaguguuacagcaauua

SEQ ID NO: 15480 - RNA, 19 nt, Artificial Sequence
  Synthetic
ggaaauagguguauggaua

SEQ ID NO: 15481 - RNA, 19 nt, Artificial Sequence
  Synthetic
ggacaaacauacaacaauu

SEQ ID NO: 15482 - RNA, 19 nt, Artificial Sequence
  Synthetic
gaugaaagcguguggagaa

SEQ ID NO: 15483 - RNA, 19 nt, Artificial Sequence
  Synthetic
cuaaugauguccaaagaaa

SEQ ID NO: 15484 - RNA, 19 nt, Artificial Sequence
  Synthetic
ggaagaacuugaagaagga

SEQ ID NO: 15485 - RNA, 19 nt, Artificial Sequence
  Synthetic
cagaauauauagccugaaa

SEQ ID NO: 15486 - RNA, 19 nt, Artificial Sequence
  Synthetic
cgaaauagaauucagguuu

SEQ ID NO: 15487 - RNA, 19 nt, Artificial Sequence
  Synthetic
guguacuucuugugaauua

SEQ ID NO: 15488 - RNA, 19 nt, Artificial Sequence
  Synthetic
aguagaauguggaccuaaa

SEQ ID NO: 15489 - RNA, 19 nt, Artificial Sequence
  Synthetic
aguuguacuucaagagcua

SEQ ID NO: 15490 - RNA, 19 nt, Artificial Sequence
  Synthetic
ccucagagacugugccauu

SEQ ID NO: 15491 - RNA, 19 nt, Artificial Sequence
  Synthetic
gaguuaaaguuccucguaa

SEQ ID NO: 15492 - RNA, 19 nt, Artificial Sequence
  Synthetic
aaagagagcugcaguugaa

SEQ ID NO: 15493 - RNA, 19 nt, Artificial Sequence
  Synthetic
aguuaaaguuccucguaau

SEQ ID NO: 15494 - RNA, 19 nt, Artificial Sequence
  Synthetic
guucaggauuguuuugaua

SEQ ID NO: 15495 - RNA, 19 nt, Artificial Sequence
  Synthetic
gcacugucauuuaaacaua

SEQ ID NO: 15496 - RNA, 19 nt, Artificial Sequence
  Synthetic
aggcaugauuauugggcca

SEQ ID NO: 15497 - RNA, 19 nt, Artificial Sequence
  Synthetic
gaugaagauaugacacuua

SEQ ID NO: 15498 - RNA, 19 nt, Artificial Sequence
  Synthetic
guuggaagaacuugaagaa

SEQ ID NO: 15499 - RNA, 19 nt, Artificial Sequence
  Synthetic
gaaauagguguauggauau

SEQ ID NO: 15500 - RNA, 19 nt, Artificial Sequence
  Synthetic
auaaauaauuccaguggga

SEQ ID NO: 15501 - RNA, 19 nt, Artificial Sequence
  Synthetic
ccaaggacaaauuaugaaa

SEQ ID NO: 15502 - RNA, 19 nt, Artificial Sequence
  Synthetic
gcauaccaguguuagcaaa

SEQ ID NO: 15503 - RNA, 19 nt, Artificial Sequence
  Synthetic
agaacuugaagaaggacaa

SEQ ID NO: 15504 - RNA, 19 nt, Artificial Sequence
  Synthetic
aagcuguucuuguguguua

SEQ ID NO: 15505 - RNA, 19 nt, Artificial Sequence
  Synthetic
cuggacauuuguaagaaua

SEQ ID NO: 15506 - RNA, 19 nt, Artificial Sequence
  Synthetic
cuuacaagguggacaggca

SEQ ID NO: 15507 - RNA, 19 nt, Artificial Sequence
  Synthetic
acagaaauggcaugcuuua

SEQ ID NO: 15508 - RNA, 19 nt, Artificial Sequence
  Synthetic
acauaaaccuggaguacuc

SEQ ID NO: 15509 - RNA, 19 nt, Artificial Sequence
  Synthetic
gaauauauagccugaaagu

SEQ ID NO: 15510 - RNA, 19 nt, Artificial Sequence
  Synthetic
agacaaagaugaagaugaa

SEQ ID NO: 15511 - RNA, 19 nt, Artificial Sequence
  Synthetic
guagagaaagagaggauua

SEQ ID NO: 15512 - RNA, 19 nt, Artificial Sequence
  Synthetic
ccucagaacuuuaguaaca

SEQ ID NO: 15513 - RNA, 19 nt, Artificial Sequence
  Synthetic
uaacagaagagaagguaua

SEQ ID NO: 15514 - RNA, 19 nt, Artificial Sequence
  Synthetic
aaguagaaacagagaacaa

SEQ ID NO: 15515 - RNA, 19 nt, Artificial Sequence
  Synthetic
ggaauuugaaggagaacaa

SEQ ID NO: 15516 - RNA, 19 nt, Artificial Sequence
  Synthetic
gggagaaauuggaauguuu

SEQ ID NO: 15517 - RNA, 19 nt, Artificial Sequence
  Synthetic
guaauuaaagugaggagaa

SEQ ID NO: 15518 - RNA, 19 nt, Artificial Sequence
  Synthetic
ggagaagaaagaagaaaca

SEQ ID NO: 15519 - RNA, 19 nt, Artificial Sequence
  Synthetic
caacaaaguuaggaaguuu

SEQ ID NO: 15520 - RNA, 19 nt, Artificial Sequence
  Synthetic
caagaaaggcgcuagaauu

SEQ ID NO: 15521 - RNA, 19 nt, Artificial Sequence
  Synthetic
caaaugaaaugguagucaa

SEQ ID NO: 15522 - RNA, 19 nt, Artificial Sequence
  Synthetic
agcaaaagaugaagacaaa

SEQ ID NO: 15523 - RNA, 19 nt, Artificial Sequence
  Synthetic
aggcauugguacagagcuu

SEQ ID NO: 15524 - RNA, 19 nt, Artificial Sequence
  Synthetic
gaagagaagguauaugaaa

SEQ ID NO: 15525 - RNA, 19 nt, Artificial Sequence
  Synthetic
gcaccaguguuauuggaaa

SEQ ID NO: 15526 - RNA, 19 nt, Artificial Sequence
  Synthetic
ggaagaagacucagaagca

SEQ ID NO: 15527 - RNA, 19 nt, Artificial Sequence
  Synthetic
guucaaggcuuuucggaga

SEQ ID NO: 15528 - RNA, 19 nt, Artificial Sequence
  Synthetic
ucagaaguuuggcgaaaua

SEQ ID NO: 15529 - RNA, 19 nt, Artificial Sequence
  Synthetic
cagucgaaaucuagugaau

SEQ ID NO: 15530 - RNA, 19 nt, Artificial Sequence
  Synthetic
gcgugaaaguguuacauau

SEQ ID NO: 15531 - RNA, 19 nt, Artificial Sequence
  Synthetic
ugaaugagguucuagaaau

SEQ ID NO: 15532 - RNA, 19 nt, Artificial Sequence
  Synthetic
auuagggaguucugggaaa

SEQ ID NO: 15533 - RNA, 19 nt, Artificial Sequence
  Synthetic
gaagaaagaagaaacaaga

SEQ ID NO: 15534 - RNA, 19 nt, Artificial Sequence
  Synthetic
gagaugaucgcuauggaaa

SEQ ID NO: 15535 - RNA, 19 nt, Artificial Sequence
  Synthetic
ggugauugauugauugauu

SEQ ID NO: 15536 - RNA, 19 nt, Artificial Sequence
  Synthetic
agaugaagacaaagaugaa

SEQ ID NO: 15537 - RNA, 19 nt, Artificial Sequence
  Synthetic
aagcaaaagaugaagacaa

SEQ ID NO: 15538 - RNA, 19 nt, Artificial Sequence
  Synthetic
gucgaaaucuagugaauga

SEQ ID NO: 15539 - RNA, 19 nt, Artificial Sequence
  Synthetic
gcucacagggagacaacaa

SEQ ID NO: 15540 - RNA, 19 nt, Artificial Sequence
  Synthetic
gugcaaauauaaugggaca

SEQ ID NO: 15541 - RNA, 19 nt, Artificial Sequence
  Synthetic
aagaaaggcuugugcagaa

SEQ ID NO: 15542 - RNA, 19 nt, Artificial Sequence
  Synthetic
ggagagagauugaugacuu

SEQ ID NO: 15543 - RNA, 19 nt, Artificial Sequence
  Synthetic
ccacaguccuucagaguuu

SEQ ID NO: 15544 - RNA, 19 nt, Artificial Sequence
  Synthetic
agagauaucaggagagaga

SEQ ID NO: 15545 - RNA, 19 nt, Artificial Sequence
  Synthetic
caaagaggauaaugagaga

SEQ ID NO: 15546 - RNA, 19 nt, Artificial Sequence
  Synthetic
gcacagggcugcagaaaau

SEQ ID NO: 15547 - RNA, 19 nt, Artificial Sequence
  Synthetic
ggaacaaacacuaaccuaa

SEQ ID NO: 15548 - RNA, 19 nt, Artificial Sequence
  Synthetic
ccuacauccaugagaauua

SEQ ID NO: 15549 - RNA, 19 nt, Artificial Sequence
  Synthetic
cagauggguucgugaguuu

SEQ ID NO: 15550 - RNA, 19 nt, Artificial Sequence
  Synthetic
ggauggaauuguagagaac

SEQ ID NO: 15551 - RNA, 19 nt, Artificial Sequence
  Synthetic
ucagaaucaaagaggauaa

SEQ ID NO: 15552 - RNA, 19 nt, Artificial Sequence
  Synthetic
uggaagagcuggucacuau

SEQ ID NO: 15553 - RNA, 19 nt, Artificial Sequence
  Synthetic
gggagagagugauuuauaa

SEQ ID NO: 15554 - RNA, 19 nt, Artificial Sequence
  Synthetic
ggaaacauggcaaggaauu

SEQ ID NO: 15555 - RNA, 19 nt, Artificial Sequence
  Synthetic
gggauggaauuguagagaa

SEQ ID NO: 15556 - RNA, 19 nt, Artificial Sequence
  Synthetic
uguuagaggaggagacaga

SEQ ID NO: 15557 - RNA, 19 nt, Artificial Sequence
  Synthetic
gcagagagauaucaggaga

SEQ ID NO: 15558 - RNA, 19 nt, Artificial Sequence
  Synthetic
agauaucaggagagagauu

SEQ ID NO: 15559 - RNA, 19 nt, Artificial Sequence
  Synthetic
ccgucaggcacgagaagaa

SEQ ID NO: 15560 - RNA, 19 nt, Artificial Sequence
  Synthetic
gcagaaguccagaagguuu

SEQ ID NO: 15561 - RNA, 19 nt, Artificial Sequence
  Synthetic
gggaaaaggugaaagucuu

SEQ ID NO: 15562 - RNA, 19 nt, Artificial Sequence
  Synthetic
gaaucaaagaggauaauga

SEQ ID NO: 15563 - RNA, 19 nt, Artificial Sequence
  Synthetic
caacagaucaagaacauuu

SEQ ID NO: 15564 - RNA, 19 nt, Artificial Sequence
  Synthetic
ucaagaacauuuuguggua

SEQ ID NO: 15565 - RNA, 19 nt, Artificial Sequence
  Synthetic
ccagaguguuagaggagga

SEQ ID NO: 15566 - RNA, 19 nt, Artificial Sequence
  Synthetic
gugugaaguuugucaauga

SEQ ID NO: 15567 - RNA, 19 nt, Artificial Sequence
  Synthetic
caacaugccaggugacauu

SEQ ID NO: 15568 - RNA, 19 nt, Artificial Sequence
  Synthetic
cgauagagcccgucaggca

SEQ ID NO: 15569 - RNA, 19 nt, Artificial Sequence
  Synthetic
agucgacugcagagagaua

SEQ ID NO: 15570 - RNA, 19 nt, Artificial Sequence
  Synthetic
ggagaaaacuggaggaaaa

SEQ ID NO: 15571 - RNA, 19 nt, Artificial Sequence
  Synthetic
ugacagaccaggagaauaa

SEQ ID NO: 15572 - RNA, 19 nt, Artificial Sequence
  Synthetic
ggaaaugaaccuagaaaca

SEQ ID NO: 15573 - RNA, 19 nt, Artificial Sequence
  Synthetic
agaaauggcaguagagcua

SEQ ID NO: 15574 - RNA, 19 nt, Artificial Sequence
  Synthetic
gaauagauacugugaacua

SEQ ID NO: 15575 - RNA, 19 nt, Artificial Sequence
  Synthetic
caguagagcuagaagauca

SEQ ID NO: 15576 - RNA, 19 nt, Artificial Sequence
  Synthetic
cauuaaugcugcugaauau

SEQ ID NO: 15577 - RNA, 19 nt, Artificial Sequence
  Synthetic
gcaacuuggcagagagaau

SEQ ID NO: 15578 - RNA, 19 nt, Artificial Sequence
  Synthetic
cagaguaacuucacauaaa

SEQ ID NO: 15579 - RNA, 19 nt, Artificial Sequence
  Synthetic
gcaggaaauaugugagcaa

SEQ ID NO: 15580 - RNA, 19 nt, Artificial Sequence
  Synthetic
gcauagaaagaaugaagaa

SEQ ID NO: 15581 - RNA, 19 nt, Artificial Sequence
  Synthetic
ggagcaacuugaauagaua

SEQ ID NO: 15582 - RNA, 19 nt, Artificial Sequence
  Synthetic
gagcagacuuucuaacaua

SEQ ID NO: 15583 - RNA, 19 nt, Artificial Sequence
  Synthetic
gauaauagcgugucagaga

SEQ ID NO: 15584 - RNA, 19 nt, Artificial Sequence
  Synthetic
ugagaaggaucgaggugaa

SEQ ID NO: 15585 - RNA, 19 nt, Artificial Sequence
  Synthetic
ggaauaugauuauggcuuu

SEQ ID NO: 15586 - RNA, 19 nt, Artificial Sequence
  Synthetic
gggagagcauuaaggauuu

SEQ ID NO: 15587 - RNA, 19 nt, Artificial Sequence
  Synthetic
cgggagagcauuaaggauu

SEQ ID NO: 15588 - RNA, 19 nt, Artificial Sequence
  Synthetic
auaaauaagccugggaaua

SEQ ID NO: 15589 - RNA, 19 nt, Artificial Sequence
  Synthetic
gggcaaauguaccagaaga

SEQ ID NO: 15590 - RNA, 19 nt, Artificial Sequence
  Synthetic
ccaagaggcuaauacuaaa

SEQ ID NO: 15591 - RNA, 19 nt, Artificial Sequence
  Synthetic
gaggauaccuuaaagugaa

SEQ ID NO: 15592 - RNA, 19 nt, Artificial Sequence
  Synthetic
gcauuaaggauuuggcuga

SEQ ID NO: 15593 - RNA, 19 nt, Artificial Sequence
  Synthetic
ggaguugaaugaugaagaa

SEQ ID NO: 15594 - RNA, 19 nt, Artificial Sequence
  Synthetic
ucaaaguacaggaggccaa

SEQ ID NO: 15595 - RNA, 19 nt, Artificial Sequence
  Synthetic
gggaauaugauuauggcuu

SEQ ID NO: 15596 - RNA, 19 nt, Artificial Sequence
  Synthetic
agucaugauuccaguguuu

SEQ ID NO: 15597 - RNA, 19 nt, Artificial Sequence
  Synthetic
uaacuuaccaagaggcuaa

SEQ ID NO: 15598 - RNA, 19 nt, Artificial Sequence
  Synthetic
gaucgaggugaaugggaua

SEQ ID NO: 15599 - RNA, 19 nt, Artificial Sequence
  Synthetic
uguguagacuucugaauaa

SEQ ID NO: 15600 - RNA, 19 nt, Artificial Sequence
  Synthetic
aggaagagaugaagaacaa

SEQ ID NO: 15601 - RNA, 19 nt, Artificial Sequence
  Synthetic
caauagaacuguagaagau

SEQ ID NO: 15602 - RNA, 19 nt, Artificial Sequence
  Synthetic
ccgagaaaguggaggagau

SEQ ID NO: 15603 - RNA, 19 nt, Artificial Sequence
  Synthetic
acagaaaucucuugcuaaa

SEQ ID NO: 15604 - RNA, 19 nt, Artificial Sequence
  Synthetic
gaaaaugaucgaagagaaa

SEQ ID NO: 15605 - RNA, 19 nt, Artificial Sequence
  Synthetic
agacagauaugcugaacua

SEQ ID NO: 15606 - RNA, 19 nt, Artificial Sequence
  Synthetic
caaagaagcuguuggacca

SEQ ID NO: 15607 - RNA, 19 nt, Artificial Sequence
  Synthetic
uugaaaacccugagaaaua

SEQ ID NO: 15608 - RNA, 19 nt, Artificial Sequence
  Synthetic
agaagauguugcagaauuu

SEQ ID NO: 15609 - RNA, 19 nt, Artificial Sequence
  Synthetic
cgauggaagaugugaauga

SEQ ID NO: 15610 - RNA, 19 nt, Artificial Sequence
  Synthetic
cggcagacgcugacagaga

SEQ ID NO: 15611 - RNA, 19 nt, Artificial Sequence
  Synthetic
gaaaggacauggaugagaa

SEQ ID NO: 15612 - RNA, 19 nt, Artificial Sequence
  Synthetic
ggagcaaguaauugggauu

SEQ ID NO: 15613 - RNA, 19 nt, Artificial Sequence
  Synthetic
gaguuggaauagaggaaaa

SEQ ID NO: 15614 - RNA, 19 nt, Artificial Sequence
  Synthetic
gcaacuagacaccgcgaaa

SEQ ID NO: 15615 - RNA, 19 nt, Artificial Sequence
  Synthetic
ggagaugaggguuggguuu

SEQ ID NO: 15616 - RNA, 19 nt, Artificial Sequence
  Synthetic
uguagaagauguugcagaa

SEQ ID NO: 15617 - RNA, 19 nt, Artificial Sequence
  Synthetic
cgagaaaguggaggagaua

SEQ ID NO: 15618 - RNA, 19 nt, Artificial Sequence
  Synthetic
uaaugaaagccaauggaaa

SEQ ID NO: 15619 - RNA, 19 nt, Artificial Sequence
  Synthetic
ugacacacguucagaagaa

SEQ ID NO: 15620 - RNA, 19 nt, Artificial Sequence
  Synthetic
ggacagaccucucagccaa

SEQ ID NO: 15621 - RNA, 19 nt, Artificial Sequence
  Synthetic
ccgaguuggaauagaggaa

SEQ ID NO: 15622 - RNA, 19 nt, Artificial Sequence
  Synthetic
uggaggagauaguggccaa

SEQ ID NO: 15623 - RNA, 19 nt, Artificial Sequence
  Synthetic
aagcggagccucagugaua

SEQ ID NO: 15624 - RNA, 19 nt, Artificial Sequence
  Synthetic
cugcaaugcugaacuuuaa

SEQ ID NO: 15625 - RNA, 19 nt, Artificial Sequence
  Synthetic
gaacuuuaaucuucagcaa

SEQ ID NO: 15626 - RNA, 19 nt, Artificial Sequence
  Synthetic
ugaaaaugaucgaagagaa

SEQ ID NO: 15627 - RNA, 19 nt, Artificial Sequence
  Synthetic
uugaaaugauugagaacca

SEQ ID NO: 15628 - RNA, 19 nt, Artificial Sequence
  Synthetic
gcucaauagaacuguagaa

SEQ ID NO: 15629 - RNA, 19 nt, Artificial Sequence
  Synthetic
cacccaagaugucggauua

SEQ ID NO: 15630 - RNA, 19 nt, Artificial Sequence
  Synthetic
ggaugaauauggagaaaca

SEQ ID NO: 15631 - RNA, 19 nt, Artificial Sequence
  Synthetic
ucaaauagcaucaaggaaa

SEQ ID NO: 15632 - RNA, 19 nt, Artificial Sequence
  Synthetic
gauuauggcucaucagaaa

SEQ ID NO: 15633 - RNA, 19 nt, Artificial Sequence
  Synthetic
gugaagcgauuaagagaaa

SEQ ID NO: 15634 - RNA, 19 nt, Artificial Sequence
  Synthetic
cugcagaugaugagcgaaa

SEQ ID NO: 15635 - RNA, 19 nt, Artificial Sequence
  Synthetic
ggacaaauugggaagagua

SEQ ID NO: 15636 - RNA, 19 nt, Artificial Sequence
  Synthetic
ggacagaaagauuaagaau

SEQ ID NO: 15637 - RNA, 19 nt, Artificial Sequence
  Synthetic
agaaaugacuauaugggaa

SEQ ID NO: 15638 - RNA, 19 nt, Artificial Sequence
  Synthetic
cuuggaaaguggagaauau

SEQ ID NO: 15639 - RNA, 19 nt, Artificial Sequence
  Synthetic
gaacauaugcagaagaaaa

SEQ ID NO: 15640 - RNA, 19 nt, Artificial Sequence
  Synthetic
aagaagaacaggaggugaa

SEQ ID NO: 15641 - RNA, 19 nt, Artificial Sequence
  Synthetic
ccagaaaucuacugccuua

SEQ ID NO: 15642 - RNA, 19 nt, Artificial Sequence
  Synthetic
gcuuagagaaugucauaaa

SEQ ID NO: 15643 - RNA, 19 nt, Artificial Sequence
  Synthetic
gggaagaguauaugcagua

SEQ ID NO: 15644 - RNA, 19 nt, Artificial Sequence
  Synthetic
gguccugguugaagguaaa

SEQ ID NO: 15645 - RNA, 19 nt, Artificial Sequence
  Synthetic
uagagguacuaguggaaua

SEQ ID NO: 15646 - RNA, 19 nt, Artificial Sequence
  Synthetic
caaauagcaucaaggaaau

SEQ ID NO: 15647 - RNA, 19 nt, Artificial Sequence
  Synthetic
cuauggaauuugugaagua

SEQ ID NO: 15648 - RNA, 19 nt, Artificial Sequence
  Synthetic
ggagaaaacaagaaaacaa

SEQ ID NO: 15649 - RNA, 19 nt, Artificial Sequence
  Synthetic
acaaaguccuacagaguau

SEQ ID NO: 15650 - RNA, 19 nt, Artificial Sequence
  Synthetic
aggaagauauaaagaguca

SEQ ID NO: 15651 - RNA, 19 nt, Artificial Sequence
  Synthetic
auaaacaacugcagaaaga

SEQ ID NO: 15652 - RNA, 19 nt, Artificial Sequence
  Synthetic
gcugagauguggcgaagaa

SEQ ID NO: 15653 - RNA, 19 nt, Artificial Sequence
  Synthetic
caauauggacagaaagauu

SEQ ID NO: 15654 - RNA, 19 nt, Artificial Sequence
  Synthetic
gguacugagaggauggaaa

SEQ ID NO: 15655 - RNA, 19 nt, Artificial Sequence
  Synthetic
ccaaauggcuuuucauauu

SEQ ID NO: 15656 - RNA, 19 nt, Artificial Sequence
  Synthetic
cuauaugggaagaggaaaa

SEQ ID NO: 15657 - RNA, 19 nt, Artificial Sequence
  Synthetic
uuucaaaaguggagagaca

SEQ ID NO: 15658 - RNA, 19 nt, Artificial Sequence
  Synthetic
ccaaagaagaggucacaau

SEQ ID NO: 15659 - RNA, 19 nt, Artificial Sequence
  Synthetic
ccgaagacagguugggcaa

SEQ ID NO: 15660 - RNA, 19 nt, Artificial Sequence
  Synthetic
gggcaaaucaugagaauaa

SEQ ID NO: 15661 - RNA, 19 nt, Artificial Sequence
  Synthetic
agaaagaccugcugaauuu

SEQ ID NO: 15662 - RNA, 19 nt, Artificial Sequence
  Synthetic
caacagggauauuaugaua

SEQ ID NO: 15663 - RNA, 19 nt, Artificial Sequence
  Synthetic
cgagcaaggagaagacaaa

SEQ ID NO: 15664 - RNA, 19 nt, Artificial Sequence
  Synthetic
gcaaagaaguauggguuau

SEQ ID NO: 15665 - RNA, 19 nt, Artificial Sequence
  Synthetic
aagaagaaguagugagucu

SEQ ID NO: 15666 - RNA, 19 nt, Artificial Sequence
  Synthetic
ggaccuaacuguggaagaa

SEQ ID NO: 15667 - RNA, 19 nt, Artificial Sequence
  Synthetic
ggcaaagaaguauggguua

SEQ ID NO: 15668 - RNA, 19 nt, Artificial Sequence
  Synthetic
ggcacagacuucaggcaaa

SEQ ID NO: 15669 - RNA, 19 nt, Artificial Sequence
  Synthetic
ucacagagauuacaguaua

SEQ ID NO: 15670 - RNA, 19 nt, Artificial Sequence
  Synthetic
uuacaaacugcuugguuaa

SEQ ID NO: 15671 - RNA, 19 nt, Artificial Sequence
  Synthetic
gaucggaauuggauguaau

SEQ ID NO: 15672 - RNA, 19 nt, Artificial Sequence
  Synthetic
ugggaaucuuagucggaaa

SEQ ID NO: 15673 - RNA, 19 nt, Artificial Sequence
  Synthetic
cagaaagaccugcugaauu

SEQ ID NO: 15674 - RNA, 19 nt, Artificial Sequence
  Synthetic
caguggaaaucaugaccua

SEQ ID NO: 15675 - RNA, 19 nt, Artificial Sequence
  Synthetic
cgguauugccugcacauua

SEQ ID NO: 15676 - RNA, 19 nt, Artificial Sequence
  Synthetic
gcucaaggcagaauauauu

SEQ ID NO: 15677 - RNA, 19 nt, Artificial Sequence
  Synthetic
uuuacaaacugcuugguua

SEQ ID NO: 15678 - RNA, 19 nt, Artificial Sequence
  Synthetic
guagaggguuucuugauua

SEQ ID NO: 15679 - RNA, 19 nt, Artificial Sequence
  Synthetic
guacagagcaauguggaua

SEQ ID NO: 15680 - RNA, 19 nt, Artificial Sequence
  Synthetic
agaaaugauugccaaguuu

SEQ ID NO: 15681 - RNA, 19 nt, Artificial Sequence
  Synthetic
caucucaaccaguggaaau

SEQ ID NO: 15682 - RNA, 19 nt, Artificial Sequence
  Synthetic
ccaagaagaaguagugagu

SEQ ID NO: 15683 - RNA, 19 nt, Artificial Sequence
  Synthetic
aggcaaagaaguauggguu

SEQ ID NO: 15684 - RNA, 19 nt, Artificial Sequence
  Synthetic
gaaagaagauacaguuacu

SEQ ID NO: 15685 - RNA, 19 nt, Artificial Sequence
  Synthetic
aauucaaagagcugggcaa

SEQ ID NO: 15686 - RNA, 19 nt, Artificial Sequence
  Synthetic
uugaugugguacagagcaa

SEQ ID NO: 15687 - RNA, 19 nt, Artificial Sequence
  Synthetic
ccaauucguuucuggauuu

SEQ ID NO: 15688 - RNA, 19 nt, Artificial Sequence
  Synthetic
gguuggagguggagaacuc

SEQ ID NO: 15689 - RNA, 19 nt, Artificial Sequence
  Synthetic
gcagaauauauuugcccua

SEQ ID NO: 15690 - RNA, 19 nt, Artificial Sequence
  Synthetic
gcucagaggugcugguaaa

SEQ ID NO: 15691 - RNA, 19 nt, Artificial Sequence
  Synthetic
ucacauaccugcagacaaa

SEQ ID NO: 15692 - RNA, 19 nt, Artificial Sequence
  Synthetic
agauauaacguuaggguuu

SEQ ID NO: 15693 - RNA, 19 nt, Artificial Sequence
  Synthetic
gggaagaaugagacaauuu

SEQ ID NO: 15694 - RNA, 19 nt, Artificial Sequence
  Synthetic
ucagagaggacaagagcaa

SEQ ID NO: 15695 - RNA, 19 nt, Artificial Sequence
  Synthetic
gagagaaggagaacagcaa

SEQ ID NO: 15696 - RNA, 19 nt, Artificial Sequence
  Synthetic
aaaccaagguggagcccua

SEQ ID NO: 15697 - RNA, 19 nt, Artificial Sequence
  Synthetic
caucuaaaguccagugaca

SEQ ID NO: 15698 - RNA, 19 nt, Artificial Sequence
  Synthetic
cuguauauguaccaagaaa

SEQ ID NO: 15699 - RNA, 19 nt, Artificial Sequence
  Synthetic
ggagagcggcugagagaga

SEQ ID NO: 15700 - RNA, 19 nt, Artificial Sequence
  Synthetic
ugaaguuguugcaaggaaa

SEQ ID NO: 15701 - RNA, 19 nt, Artificial Sequence
  Synthetic
ugucaaggguggcaagaau

SEQ ID NO: 15702 - RNA, 19 nt, Artificial Sequence
  Synthetic
gcaagaagaaggcgaagau

SEQ ID NO: 15703 - RNA, 19 nt, Artificial Sequence
  Synthetic
gagaaggagaacagcaaga

SEQ ID NO: 15704 - RNA, 19 nt, Artificial Sequence
  Synthetic
gcaagagggaggaggagga

SEQ ID NO: 15705 - RNA, 19 nt, Artificial Sequence
  Synthetic
ugagagagagcaagaagaa

SEQ ID NO: 15706 - RNA, 19 nt, Artificial Sequence
  Synthetic
uguacaaggucaaugagua

SEQ ID NO: 15707 - RNA, 19 nt, Artificial Sequence
  Synthetic
gggaaccguuugagccuua

SEQ ID NO: 15708 - RNA, 19 nt, Artificial Sequence
  Synthetic
gggaaggaccggaucaaga

SEQ ID NO: 15709 - RNA, 19 nt, Artificial Sequence
  Synthetic
cagacaaacuggagcaaug

SEQ ID NO: 15710 - RNA, 19 nt, Artificial Sequence
  Synthetic
ggguagugguggucgagau

SEQ ID NO: 15711 - RNA, 19 nt, Artificial Sequence
  Synthetic
guaaaguggaggagacguu

SEQ ID NO: 15712 - RNA, 19 nt, Artificial Sequence
  Synthetic
ccuccuuauucuuagauua

SEQ ID NO: 15713 - RNA, 19 nt, Artificial Sequence
  Synthetic
guauauguaccaagaaaga

SEQ ID NO: 15714 - RNA, 19 nt, Artificial Sequence
  Synthetic
ccagcgaggacgaguggua

SEQ ID NO: 15715 - RNA, 19 nt, Artificial Sequence
  Synthetic
gugaaauacuggcccgaga

SEQ ID NO: 15716 - RNA, 19 nt, Artificial Sequence
  Synthetic
caaccagauucuagaaacu

SEQ ID NO: 15717 - RNA, 19 nt, Artificial Sequence
  Synthetic
cggcugagagagagcaaga

SEQ ID NO: 15718 - RNA, 19 nt, Artificial Sequence
  Synthetic
uggaggaggacgucauuua

SEQ ID NO: 15719 - RNA, 19 nt, Artificial Sequence
  Synthetic
ugaccaagguggaggagcu

SEQ ID NO: 15720 - RNA, 19 nt, Artificial Sequence
  Synthetic
ggaagaagccuaaaggaca

SEQ ID NO: 15721 - RNA, 19 nt, Artificial Sequence
  Synthetic
ucguguauguggugggaaa

SEQ ID NO: 15722 - RNA, 19 nt, Artificial Sequence
  Synthetic
cugaagaaggcaacagaua

SEQ ID NO: 15723 - RNA, 19 nt, Artificial Sequence
  Synthetic
gggaggaagaucagcaaau

SEQ ID NO: 15724 - RNA, 19 nt, Artificial Sequence
  Synthetic
ccuaaaggacagucaaaga

SEQ ID NO: 15725 - RNA, 19 nt, Artificial Sequence
  Synthetic
gagcagaaguggagaggau

SEQ ID NO: 15726 - RNA, 19 nt, Artificial Sequence
  Synthetic
gcaaagaagauaaggagaa

SEQ ID NO: 15727 - RNA, 19 nt, Artificial Sequence
  Synthetic
cuacaauggugcagguuaa

SEQ ID NO: 15728 - RNA, 19 nt, Artificial Sequence
  Synthetic
gcaaagaaauggauaucaa

SEQ ID NO: 15729 - RNA, 19 nt, Artificial Sequence
  Synthetic
ucacuaagcucuugacuaa

SEQ ID NO: 15730 - RNA, 19 nt, Artificial Sequence
  Synthetic
agaaagaccaccugaguua

SEQ ID NO: 15731 - RNA, 19 nt, Artificial Sequence
  Synthetic
gccaagagcuggagcguuu

SEQ ID NO: 15732 - RNA, 19 nt, Artificial Sequence
  Synthetic
auacagauauggagaguga

SEQ ID NO: 15733 - RNA, 19 nt, Artificial Sequence
  Synthetic
gauaacugauaaaggcaaa

SEQ ID NO: 15734 - RNA, 19 nt, Artificial Sequence
  Synthetic
cuaaaugucuagagaaguu

SEQ ID NO: 15735 - RNA, 19 nt, Artificial Sequence
  Synthetic
gaacggaaagcucgggaaa

SEQ ID NO: 15736 - RNA, 19 nt, Artificial Sequence
  Synthetic
ggaagaaagcaaagaaaug

SEQ ID NO: 15737 - RNA, 19 nt, Artificial Sequence
  Synthetic
ggaagaggcuaaaugucua

SEQ ID NO: 15738 - RNA, 19 nt, Artificial Sequence
  Synthetic
gaggaagaaacaaagauaa

SEQ ID NO: 15739 - RNA, 19 nt, Artificial Sequence
  Synthetic
gcccuaggcugcaggacua

SEQ ID NO: 15740 - RNA, 19 nt, Artificial Sequence
  Synthetic
uaacagaggagaauaagaa

SEQ ID NO: 15741 - RNA, 19 nt, Artificial Sequence
  Synthetic
gcacugagguccaagaguu

SEQ ID NO: 15742 - RNA, 19 nt, Artificial Sequence
  Synthetic
gugggaagcugcugaugua

SEQ ID NO: 15743 - RNA, 19 nt, Artificial Sequence
  Synthetic
gauaaaggcaaagaagaua

SEQ ID NO: 15744 - RNA, 19 nt, Artificial Sequence
  Synthetic
cacaagagaugcagguuga

SEQ ID NO: 15745 - RNA, 19 nt, Artificial Sequence
  Synthetic
gugcacagcuaaugauuca

SEQ ID NO: 15746 - RNA, 19 nt, Artificial Sequence
  Synthetic
uaaaggaacuagaggaauc

SEQ ID NO: 15747 - RNA, 19 nt, Artificial Sequence
  Synthetic
ccaaagaaacaaacuguga

SEQ ID NO: 15748 - RNA, 19 nt, Artificial Sequence
  Synthetic
cagcaguaccggucacuua

SEQ ID NO: 15749 - RNA, 19 nt, Artificial Sequence
  Synthetic
aaacagcaauggacaggaa

SEQ ID NO: 15750 - RNA, 19 nt, Artificial Sequence
  Synthetic
cagaagauauggugacugu

SEQ ID NO: 15751 - RNA, 19 nt, Artificial Sequence
  Synthetic
gagaugggaagaaagauaa

SEQ ID NO: 15752 - RNA, 19 nt, Artificial Sequence
  Synthetic
gaucaugacagcaaucaaa

SEQ ID NO: 15753 - RNA, 19 nt, Artificial Sequence
  Synthetic
ugacagcaaucaaacguaa

SEQ ID NO: 15754 - RNA, 19 nt, Artificial Sequence
  Synthetic
cagcagcaguacagacuuu

SEQ ID NO: 15755 - RNA, 19 nt, Artificial Sequence
  Synthetic
ggaucaacuuggagauuua

SEQ ID NO: 15756 - RNA, 19 nt, Artificial Sequence
  Synthetic
cuacacagauugaggcuaa

SEQ ID NO: 15757 - RNA, 19 nt, Artificial Sequence
  Synthetic
gcaaagaugccgucagcua

SEQ ID NO: 15758 - RNA, 19 nt, Artificial Sequence
  Synthetic
guacaaagcaucagauuca

SEQ ID NO: 15759 - RNA, 19 nt, Artificial Sequence
  Synthetic
caaauaugcuccugaagaa

SEQ ID NO: 15760 - RNA, 19 nt, Artificial Sequence
  Synthetic
ccaaagagaacacaaauaa

SEQ ID NO: 15761 - RNA, 19 nt, Artificial Sequence
  Synthetic
gagauuaugucuacguuua

SEQ ID NO: 15762 - RNA, 19 nt, Artificial Sequence
  Synthetic
cggaugaagucuugacaga

SEQ ID NO: 15763 - RNA, 19 nt, Artificial Sequence
  Synthetic
ggaaaugacacuugagauc

SEQ ID NO: 15764 - RNA, 19 nt, Artificial Sequence
  Synthetic
aagaaaugguggacuguau

SEQ ID NO: 15765 - RNA, 19 nt, Artificial Sequence
  Synthetic
ggagcagagucucggaauu

SEQ ID NO: 15766 - RNA, 19 nt, Artificial Sequence
  Synthetic
gaagagagaugguggcaau

SEQ ID NO: 15767 - RNA, 19 nt, Artificial Sequence
  Synthetic
gcucgaagcuggaggaguu

SEQ ID NO: 15768 - RNA, 19 nt, Artificial Sequence
  Synthetic
gagaagaugaagagggcau

SEQ ID NO: 15769 - RNA, 19 nt, Artificial Sequence
  Synthetic
gcuagaagacauuaagaau

SEQ ID NO: 15770 - RNA, 19 nt, Artificial Sequence
  Synthetic
gcaacaaguucauagccua

SEQ ID NO: 15771 - RNA, 19 nt, Artificial Sequence
  Synthetic
ugaaggagccgcugagcaa

SEQ ID NO: 15772 - RNA, 19 nt, Artificial Sequence
  Synthetic
acaaggagcuggugaagga

SEQ ID NO: 15773 - RNA, 19 nt, Artificial Sequence
  Synthetic
gaguuuaccagcagggauu

SEQ ID NO: 15774 - RNA, 19 nt, Artificial Sequence
  Synthetic
gcaaggaggaggacugcaa

SEQ ID NO: 15775 - RNA, 19 nt, Artificial Sequence
  Synthetic
cagagaacguccaguccua

SEQ ID NO: 15776 - RNA, 19 nt, Artificial Sequence
  Synthetic
caacugaagcagcacaaua

SEQ ID NO: 15777 - RNA, 19 nt, Artificial Sequence
  Synthetic
ucaagcauaucgagaacaa

SEQ ID NO: 15778 - RNA, 19 nt, Artificial Sequence
  Synthetic
uauuugagauggcgauuaa

SEQ ID NO: 15779 - RNA, 19 nt, Artificial Sequence
  Synthetic
cggcauagcaagacccaga

SEQ ID NO: 15780 - RNA, 19 nt, Artificial Sequence
  Synthetic
agagcaacaugaagcgcua

SEQ ID NO: 15781 - RNA, 19 nt, Artificial Sequence
  Synthetic
uggagaugcuguuuaagaa

SEQ ID NO: 15782 - RNA, 19 nt, Artificial Sequence
  Synthetic
ccgacaagcagauucuaaa

SEQ ID NO: 15783 - RNA, 19 nt, Artificial Sequence
  Synthetic
acaugaagcgcuacggcaa

SEQ ID NO: 15784 - RNA, 19 nt, Artificial Sequence
  Synthetic
agaaggauccacaggucaa

SEQ ID NO: 15785 - RNA, 19 nt, Artificial Sequence
  Synthetic
agaagaaccuauuugagau

SEQ ID NO: 15786 - RNA, 19 nt, Artificial Sequence
  Synthetic
caacaguggaggaccaaga

SEQ ID NO: 15787 - RNA, 19 nt, Artificial Sequence
  Synthetic
gggacuuuguacugauuau

SEQ ID NO: 15788 - RNA, 19 nt, Artificial Sequence
  Synthetic
aagagaagcuucacgcaga

SEQ ID NO: 15789 - RNA, 19 nt, Artificial Sequence
  Synthetic
uggaggaguucaucaagaa

SEQ ID NO: 15790 - RNA, 19 nt, Artificial Sequence
  Synthetic
uugagcaggcagagagcaa

SEQ ID NO: 15791 - RNA, 19 nt, Artificial Sequence
  Synthetic
aacacugcuuugagaguua

SEQ ID NO: 15792 - RNA, 19 nt, Artificial Sequence
  Synthetic
caucaugagugguaccuga

SEQ ID NO: 15793 - RNA, 19 nt, Artificial Sequence
  Synthetic
gcaauauauccgaaccauu

SEQ ID NO: 15794 - RNA, 19 nt, Artificial Sequence
  Synthetic
ggaaccuggagaagagaga

SEQ ID NO: 15795 - RNA, 19 nt, Artificial Sequence
  Synthetic
uaagcagccuggaggaaga

SEQ ID NO: 15796 - RNA, 19 nt, Artificial Sequence
  Synthetic
gcauaaggcaagagcaaga

SEQ ID NO: 15797 - RNA, 19 nt, Artificial Sequence
  Synthetic
cgagagagagagagagaga

SEQ ID NO: 15798 - RNA, 19 nt, Artificial Sequence
  Synthetic
ugauggagguggagagcau

SEQ ID NO: 15799 - RNA, 19 nt, Artificial Sequence
  Synthetic
gggcauugggugagaaagu

SEQ ID NO: 15800 - RNA, 19 nt, Artificial Sequence
  Synthetic
guucauaggccgagcagca

SEQ ID NO: 15801 - RNA, 19 nt, Artificial Sequence
  Synthetic
cugaguuccugcagcgaaa

SEQ ID NO: 15802 - RNA, 19 nt, Artificial Sequence
  Synthetic
gcaccuaucuggacaugaa

SEQ ID NO: 15803 - RNA, 19 nt, Artificial Sequence
  Synthetic
cgaucuggccaaagaguau

SEQ ID NO: 15804 - RNA, 19 nt, Artificial Sequence
  Synthetic
gaagggagccugugauuuu

SEQ ID NO: 15805 - RNA, 19 nt, Artificial Sequence
  Synthetic
ccgauuaucucgcugcaua

SEQ ID NO: 15806 - RNA, 19 nt, Artificial Sequence
  Synthetic
gcccauuguacgugcuaaa

SEQ ID NO: 15807 - RNA, 19 nt, Artificial Sequence
  Synthetic
gggaucacuuccuggagaa

SEQ ID NO: 15808 - RNA, 19 nt, Artificial Sequence
  Synthetic
cgaaauggacagaagguac

SEQ ID NO: 15809 - RNA, 19 nt, Artificial Sequence
  Synthetic
cuguucaccucgagagaga

SEQ ID NO: 15810 - RNA, 19 nt, Artificial Sequence
  Synthetic
agagcuacuuugaggagau

SEQ ID NO: 15811 - RNA, 19 nt, Artificial Sequence
  Synthetic
ggucggugguggugaugga

SEQ ID NO: 15812 - RNA, 19 nt, Artificial Sequence
  Synthetic
gaaccgaaauggacagaag

SEQ ID NO: 15813 - RNA, 19 nt, Artificial Sequence
  Synthetic
gacguaaggaugacgcaaa

SEQ ID NO: 15814 - RNA, 19 nt, Artificial Sequence
  Synthetic
ggaacaaggcacugggcac

SEQ ID NO: 15815 - RNA, 19 nt, Artificial Sequence
  Synthetic
gugagaaagugaugcuagu

SEQ ID NO: 15816 - RNA, 19 nt, Artificial Sequence
  Synthetic
ccgcugaagcacaugguga

SEQ ID NO: 15817 - RNA, 19 nt, Artificial Sequence
  Synthetic
acguaaggaugacgcaaaa

SEQ ID NO: 15818 - RNA, 19 nt, Artificial Sequence
  Synthetic
acgcaaaaguucacaagau

SEQ ID NO: 15819 - RNA, 19 nt, Artificial Sequence
  Synthetic
cgcugaagcacauggugaa

SEQ ID NO: 15820 - RNA, 19 nt, Artificial Sequence
  Synthetic
cucgagagagagagagaga

SEQ ID NO: 15821 - RNA, 19 nt, Artificial Sequence
  Synthetic
uggagaaggaagugcccau

SEQ ID NO: 15822 - RNA, 19 nt, Artificial Sequence
  Synthetic
aggaggaggcucuggcuga

SEQ ID NO: 15823 - RNA, 19 nt, Artificial Sequence
  Synthetic
guacgugcuaaaugaagaa

SEQ ID NO: 15824 - RNA, 19 nt, Artificial Sequence
  Synthetic
cugaagggagccugugauu

SEQ ID NO: 15825 - RNA, 19 nt, Artificial Sequence
  Synthetic
gcauugggugagaaaguga

SEQ ID NO: 15826 - RNA, 19 nt, Artificial Sequence
  Synthetic
gagaaugaauguagagauu

SEQ ID NO: 15827 - RNA, 19 nt, Artificial Sequence
  Synthetic
gggccaaguucaaaggaaa

SEQ ID NO: 15828 - RNA, 19 nt, Artificial Sequence
  Synthetic
ggauuuugauucagagaaa

SEQ ID NO: 15829 - RNA, 19 nt, Artificial Sequence
  Synthetic
gcaccgaacucaaaugaaa

SEQ ID NO: 15830 - RNA, 19 nt, Artificial Sequence
  Synthetic
agacauaagauucuggaua

SEQ ID NO: 15831 - RNA, 19 nt, Artificial Sequence
  Synthetic
uggcaaugcucuggaaaua

SEQ ID NO: 15832 - RNA, 19 nt, Artificial Sequence
  Synthetic
gugcaauuuuggagaugaa

SEQ ID NO: 15833 - RNA, 19 nt, Artificial Sequence
  Synthetic
cuggagaucuguauaauaa

SEQ ID NO: 15834 - RNA, 19 nt, Artificial Sequence
  Synthetic
ugacauagcagcacgcaaa

SEQ ID NO: 15835 - RNA, 19 nt, Artificial Sequence
  Synthetic
agaaagauagucagaacaa

SEQ ID NO: 15836 - RNA, 19 nt, Artificial Sequence
  Synthetic
gaagaaagauagucagaac

SEQ ID NO: 15837 - RNA, 19 nt, Artificial Sequence
  Synthetic
gaagaaauaugaagaagca

SEQ ID NO: 15838 - RNA, 19 nt, Artificial Sequence
  Synthetic
agagaaacuuuguagaaga

SEQ ID NO: 15839 - RNA, 19 nt, Artificial Sequence
  Synthetic
ggaagacagaccagagcua

SEQ ID NO: 15840 - RNA, 19 nt, Artificial Sequence
  Synthetic
guuaagaauucucuagcaa

SEQ ID NO: 15841 - RNA, 19 nt, Artificial Sequence
  Synthetic
agaugauuauggaggaauu

SEQ ID NO: 15842 - RNA, 19 nt, Artificial Sequence
  Synthetic
cgugaaggcugcaagaaga

SEQ ID NO: 15843 - RNA, 19 nt, Artificial Sequence
  Synthetic
gacauaagauucuggauau

SEQ ID NO: 15844 - RNA, 19 nt, Artificial Sequence
  Synthetic
agucauaguucaagcaguu

SEQ ID NO: 15845 - RNA, 19 nt, Artificial Sequence
  Synthetic
ggaaaugcacagaacauau

SEQ ID NO: 15846 - RNA, 19 nt, Artificial Sequence
  Synthetic
uggcagaauuguacaccua

SEQ ID NO: 15847 - RNA, 19 nt, Artificial Sequence
  Synthetic
ggccaaggaacgagaccaa

SEQ ID NO: 15848 - RNA, 19 nt, Artificial Sequence
  Synthetic
uaaagaaauuggacagcuu

SEQ ID NO: 15849 - RNA, 19 nt, Artificial Sequence
  Synthetic
cagcauguguauuugcaua

SEQ ID NO: 15850 - RNA, 19 nt, Artificial Sequence
  Synthetic
cagauuagcuuggaugaaa

SEQ ID NO: 15851 - RNA, 19 nt, Artificial Sequence
  Synthetic
gaacagagcauaucauaga

SEQ ID NO: 15852 - RNA, 19 nt, Artificial Sequence
  Synthetic
ggauaaacaaaugcaguua

SEQ ID NO: 15853 - RNA, 19 nt, Artificial Sequence
  Synthetic
ugagagauuccuugguuaa

SEQ ID NO: 15854 - RNA, 19 nt, Artificial Sequence
  Synthetic
agagaaagcuguugacaug

SEQ ID NO: 15855 - RNA, 19 nt, Artificial Sequence
  Synthetic
gagauguuguaguggccaa

SEQ ID NO: 15856 - RNA, 19 nt, Artificial Sequence
  Synthetic
gcauauaacucucggguaa

SEQ ID NO: 15857 - RNA, 19 nt, Artificial Sequence
  Synthetic
gcucaaauguugcaggaua

SEQ ID NO: 15858 - RNA, 19 nt, Artificial Sequence
  Synthetic
gggauuugcuucagaauaa

SEQ ID NO: 15859 - RNA, 19 nt, Artificial Sequence
  Synthetic
gguccaaagugucggguua

SEQ ID NO: 15860 - RNA, 19 nt, Artificial Sequence
  Synthetic
ccaugaggcuugugugaaa

SEQ ID NO: 15861 - RNA, 19 nt, Artificial Sequence
  Synthetic
gaggcaaaguguaguguua

SEQ ID NO: 15862 - RNA, 19 nt, Artificial Sequence
  Synthetic
agacauagaugaagcauuu

SEQ ID NO: 15863 - RNA, 19 nt, Artificial Sequence
  Synthetic
gggcauuguucaagcagaa

SEQ ID NO: 15864 - RNA, 19 nt, Artificial Sequence
  Synthetic
gugaauuguuccucagaaa

SEQ ID NO: 15865 - RNA, 19 nt, Artificial Sequence
  Synthetic
ggacaaaguuggguugaua

SEQ ID NO: 15866 - RNA, 19 nt, Artificial Sequence
  Synthetic
gcucagaacugcaauuuaa

SEQ ID NO: 15867 - RNA, 19 nt, Artificial Sequence
  Synthetic
ggaaacuacucucgauuua

SEQ ID NO: 15868 - RNA, 19 nt, Artificial Sequence
  Synthetic
cuacaauacccguugauaa

SEQ ID NO: 15869 - RNA, 19 nt, Artificial Sequence
  Synthetic
ggagggauauacugaaaua

SEQ ID NO: 15870 - RNA, 19 nt, Artificial Sequence
  Synthetic
caucagaaagggagaauuu

SEQ ID NO: 15871 - RNA, 19 nt, Artificial Sequence
  Synthetic
gagggaagcccgagaaaca

SEQ ID NO: 15872 - RNA, 19 nt, Artificial Sequence
  Synthetic
ggaaagcuguguuuggaaa

SEQ ID NO: 15873 - RNA, 19 nt, Artificial Sequence
  Synthetic
ccagaaagagcuuggauau

SEQ ID NO: 15874 - RNA, 19 nt, Artificial Sequence
  Synthetic
gggugaaacuugggaacua

SEQ ID NO: 15875 - RNA, 19 nt, Artificial Sequence
  Synthetic
cguaaguacuccauuguaa

SEQ ID NO: 15876 - RNA, 19 nt, Artificial Sequence
  Synthetic
ggagaaggacaguuugaaa

SEQ ID NO: 15877 - RNA, 19 nt, Artificial Sequence
  Synthetic
uaacugagaaugagguaaa

SEQ ID NO: 15878 - RNA, 19 nt, Artificial Sequence
  Synthetic
agacaaggaccguauaaua

SEQ ID NO: 15879 - RNA, 19 nt, Artificial Sequence
  Synthetic
ccuuugaacuccaugguua

SEQ ID NO: 15880 - RNA, 19 nt, Artificial Sequence
  Synthetic
gcacgugggucuaaagaga

SEQ ID NO: 15881 - RNA, 19 nt, Artificial Sequence
  Synthetic
ccagaaggacaaaggaauu

SEQ ID NO: 15882 - RNA, 19 nt, Artificial Sequence
  Synthetic
ggcaaaguguaguguuaua

SEQ ID NO: 15883 - RNA, 19 nt, Artificial Sequence
  Synthetic
uaucgaaggcuuugauuua

SEQ ID NO: 15884 - RNA, 19 nt, Artificial Sequence
  Synthetic
acucauguuucguguguaa

SEQ ID NO: 15885 - RNA, 19 nt, Artificial Sequence
  Synthetic
ccaagagggacaucagaaa

SEQ ID NO: 15886 - RNA, 19 nt, Artificial Sequence
  Synthetic
cuguaaaccucuaaagaaa

SEQ ID NO: 15887 - RNA, 19 nt, Artificial Sequence
  Synthetic
cuguaaagcuggcaagaaa

SEQ ID NO: 15888 - RNA, 19 nt, Artificial Sequence
  Synthetic
ccacugagguugugccaaa

SEQ ID NO: 15889 - RNA, 19 nt, Artificial Sequence
  Synthetic
gggaagaaccaguacuaaa

SEQ ID NO: 15890 - RNA, 19 nt, Artificial Sequence
  Synthetic
caacaaagggaauugguaa

SEQ ID NO: 15891 - RNA, 19 nt, Artificial Sequence
  Synthetic
ggagaaagauauccacaaa

SEQ ID NO: 15892 - RNA, 19 nt, Artificial Sequence
  Synthetic
uaaagaagcccuagagauu

SEQ ID NO: 15893 - RNA, 19 nt, Artificial Sequence
  Synthetic
caaaugaagagaaggcaaa

SEQ ID NO: 15894 - RNA, 19 nt, Artificial Sequence
  Synthetic
cagcaaucacucugagaaa

SEQ ID NO: 15895 - RNA, 19 nt, Artificial Sequence
  Synthetic
caaauuagaaccagaggaa

SEQ ID NO: 15896 - RNA, 19 nt, Artificial Sequence
  Synthetic
caucaaagcuaacaaagua

SEQ ID NO: 15897 - RNA, 19 nt, Artificial Sequence
  Synthetic
gagaaagcccucuaggaaa

SEQ ID NO: 15898 - RNA, 19 nt, Artificial Sequence
  Synthetic
gcaagaaacuacauuacaa

SEQ ID NO: 15899 - RNA, 19 nt, Artificial Sequence
  Synthetic
aauuagaaccagaggaaca

SEQ ID NO: 15900 - RNA, 19 nt, Artificial Sequence
  Synthetic
gggcaauaaucaacugaau

SEQ ID NO: 15901 - RNA, 19 nt, Artificial Sequence
  Synthetic
guaugaaacucaaaccaaa

SEQ ID NO: 15902 - RNA, 19 nt, Artificial Sequence
  Synthetic
gcagaaaagaaaagaggaa

SEQ ID NO: 15903 - RNA, 19 nt, Artificial Sequence
  Synthetic
acugaaauucggagacaua

SEQ ID NO: 15904 - RNA, 19 nt, Artificial Sequence
  Synthetic
ccaaagaagaagaucaaaa

SEQ ID NO: 15905 - RNA, 19 nt, Artificial Sequence
  Synthetic
gaacgugcucagugggaua

SEQ ID NO: 15906 - RNA, 19 nt, Artificial Sequence
  Synthetic
gugcugaguugaugaaauu

SEQ ID NO: 15907 - RNA, 19 nt, Artificial Sequence
  Synthetic
aaucauggguccagccuaa

SEQ ID NO: 15908 - RNA, 19 nt, Artificial Sequence
  Synthetic
gagagaaagggaaaguuaa

SEQ ID NO: 15909 - RNA, 19 nt, Artificial Sequence
  Synthetic
gcaaugaaggagauagauu

SEQ ID NO: 15910 - RNA, 19 nt, Artificial Sequence
  Synthetic
ugcaagggaucaugggaaa

SEQ ID NO: 15911 - RNA, 19 nt, Artificial Sequence
  Synthetic
caagaaguguaguucaaua

SEQ ID NO: 15912 - RNA, 19 nt, Artificial Sequence
  Synthetic
gggauggaguuaacauuua

SEQ ID NO: 15913 - RNA, 19 nt, Artificial Sequence
  Synthetic
ugagagaaagggaaaguua

SEQ ID NO: 15914 - RNA, 19 nt, Artificial Sequence
  Synthetic
caugaaagcagaaaagaaa

SEQ ID NO: 15915 - RNA, 19 nt, Artificial Sequence
  Synthetic
ccacaugaaauucuggaaa

SEQ ID NO: 15916 - RNA, 19 nt, Artificial Sequence
  Synthetic
ggagaauugaugaggauua

SEQ ID NO: 15917 - RNA, 19 nt, Artificial Sequence
  Synthetic
acacaaaccucaagcuuua

SEQ ID NO: 15918 - RNA, 19 nt, Artificial Sequence
  Synthetic
caguuuauguacagggaaa

SEQ ID NO: 15919 - RNA, 19 nt, Artificial Sequence
  Synthetic
gcuguaaagugcaaggaaa

SEQ ID NO: 15920 - RNA, 19 nt, Artificial Sequence
  Synthetic
acacugaguuagaugguaa

SEQ ID NO: 15921 - RNA, 19 nt, Artificial Sequence
  Synthetic
gagagauugucuuaggaua

SEQ ID NO: 15922 - RNA, 19 nt, Artificial Sequence
  Synthetic
ggaaacaugaugaaaguau

SEQ ID NO: 15923 - RNA, 19 nt, Artificial Sequence
  Synthetic
ggucagagauuuaacuuuu

SEQ ID NO: 15924 - RNA, 19 nt, Artificial Sequence
  Synthetic
aaauaagccucgugaacau

SEQ ID NO: 15925 - RNA, 19 nt, Artificial Sequence
  Synthetic
gaacaaugggcguaucaaa

SEQ ID NO: 15926 - RNA, 19 nt, Artificial Sequence
  Synthetic
gaugguaaauacugacuua

SEQ ID NO: 15927 - RNA, 19 nt, Artificial Sequence
  Synthetic
caagaaauguggucgugaa

SEQ ID NO: 15928 - RNA, 19 nt, Artificial Sequence
  Synthetic
caguauagcuuugugguua

SEQ ID NO: 15929 - RNA, 19 nt, Artificial Sequence
  Synthetic
ggauaaauacaccaugaua

SEQ ID NO: 15930 - RNA, 19 nt, Artificial Sequence
  Synthetic
ugaaguggucagagauuua

SEQ ID NO: 15931 - RNA, 19 nt, Artificial Sequence
  Synthetic
acguagagcuugaauguga

SEQ ID NO: 15932 - RNA, 19 nt, Artificial Sequence
  Synthetic
gaguaugggaccugaaaga

SEQ ID NO: 15933 - RNA, 19 nt, Artificial Sequence
  Synthetic
gcaaaugaccgguggguac

SEQ ID NO: 15934 - RNA, 19 nt, Artificial Sequence
  Synthetic
gaaauguggucgugaaaau

SEQ ID NO: 15935 - RNA, 19 nt, Artificial Sequence
  Synthetic
ccugaaagaugauggaaac

SEQ ID NO: 15936 - RNA, 19 nt, Artificial Sequence
  Synthetic
cagaauacacuuaacacaa

SEQ ID NO: 15937 - RNA, 19 nt, Artificial Sequence
  Synthetic
gagcuauucugcacaguua

SEQ ID NO: 15938 - RNA, 19 nt, Artificial Sequence
  Synthetic
caaagaagcaauacagcau

SEQ ID NO: 15939 - RNA, 19 nt, Artificial Sequence
  Synthetic
gguguuagcugggcagaaa

SEQ ID NO: 15940 - RNA, 19 nt, Artificial Sequence
  Synthetic
uguuuuagcugcugggaca

SEQ ID NO: 15941 - RNA, 19 nt, Artificial Sequence
  Synthetic
aagccuugcugaugauaaa

SEQ ID NO: 15942 - RNA, 19 nt, Artificial Sequence
  Synthetic
agacugaucuggaagugaa

SEQ ID NO: 15943 - RNA, 19 nt, Artificial Sequence
  Synthetic
cuggagaauugaugaggau

SEQ ID NO: 15944 - RNA, 19 nt, Artificial Sequence
  Synthetic
gcaccaagaauguuaccaa

SEQ ID NO: 15945 - RNA, 19 nt, Artificial Sequence
  Synthetic
cugcagauauuaagaaugu

SEQ ID NO: 15946 - RNA, 19 nt, Artificial Sequence
  Synthetic
caacagagccuuacguuaa

SEQ ID NO: 15947 - RNA, 19 nt, Artificial Sequence
  Synthetic
uugagaaaguugaggaauu

SEQ ID NO: 15948 - RNA, 19 nt, Artificial Sequence
  Synthetic
gguaaaucguccugucaaa

SEQ ID NO: 15949 - RNA, 19 nt, Artificial Sequence
  Synthetic
gugaauagaauguagcaaa

SEQ ID NO: 15950 - RNA, 19 nt, Artificial Sequence
  Synthetic
ugaaagaguuccucacaua

SEQ ID NO: 15951 - RNA, 19 nt, Artificial Sequence
  Synthetic
gcaucugggaccugaauaa

SEQ ID NO: 15952 - RNA, 19 nt, Artificial Sequence
  Synthetic
aaagggaguugcuggaaua

SEQ ID NO: 15953 - RNA, 19 nt, Artificial Sequence
  Synthetic
cuaaaggguuugaagccaa

SEQ ID NO: 15954 - RNA, 19 nt, Artificial Sequence
  Synthetic
agucauugccacagggaca

SEQ ID NO: 15955 - RNA, 19 nt, Artificial Sequence
  Synthetic
gcaacagagccuuacguua

SEQ ID NO: 15956 - RNA, 19 nt, Artificial Sequence
  Synthetic
accaagaugucgugagaga

SEQ ID NO: 15957 - RNA, 19 nt, Artificial Sequence
  Synthetic
ccaccaagaugucgugaga

SEQ ID NO: 15958 - RNA, 19 nt, Artificial Sequence
  Synthetic
uuacaugacucguugagaa

SEQ ID NO: 15959 - RNA, 19 nt, Artificial Sequence
  Synthetic
gugcaggaaaugacaaauu

SEQ ID NO: 15960 - RNA, 19 nt, Artificial Sequence
  Synthetic
ugagaaaguugaggaauuu

SEQ ID NO: 15961 - RNA, 19 nt, Artificial Sequence
  Synthetic
caaagggaguugcuggaau

SEQ ID NO: 15962 - RNA, 19 nt, Artificial Sequence
  Synthetic
ccugaauaaacacgguaaa

SEQ ID NO: 15963 - RNA, 19 nt, Artificial Sequence
  Synthetic
cggaaagcccuucgaaguu

SEQ ID NO: 15964 - RNA, 19 nt, Artificial Sequence
  Synthetic
gggcuuugcugcacauuuu

SEQ ID NO: 15965 - RNA, 19 nt, Artificial Sequence
  Synthetic
guaaagaauugguguaguc

SEQ ID NO: 15966 - RNA, 19 nt, Artificial Sequence
  Synthetic
ccggaaagcccuucgaagu

SEQ ID NO: 15967 - RNA, 19 nt, Artificial Sequence
  Synthetic
gcauguaguuaucuaauca

SEQ ID NO: 15968 - RNA, 19 nt, Artificial Sequence
  Synthetic
cagcaaguguugaacucuu

SEQ ID NO: 15969 - RNA, 19 nt, Artificial Sequence
  Synthetic
gcacggcaacagagccuua

SEQ ID NO: 15970 - RNA, 19 nt, Artificial Sequence
  Synthetic
cuucgaaguuuccuaacaa

SEQ ID NO: 15971 - RNA, 19 nt, Artificial Sequence
  Synthetic
aguuaucaguggccauuua

SEQ ID NO: 15972 - RNA, 19 nt, Artificial Sequence
  Synthetic
ccgccauggaugacaguga

SEQ ID NO: 15973 - RNA, 19 nt, Artificial Sequence
  Synthetic
ccgcaugacuauucagaug

SEQ ID NO: 15974 - RNA, 19 nt, Artificial Sequence
  Synthetic
ccaagaaaaugaaagaguu

SEQ ID NO: 15975 - RNA, 19 nt, Artificial Sequence
  Synthetic
gugagagaucugagcuuca

SEQ ID NO: 15976 - RNA, 19 nt, Artificial Sequence
  Synthetic
gcagauuggcagagaaaua

SEQ ID NO: 15977 - RNA, 19 nt, Artificial Sequence
  Synthetic
gaucauaacacaagaacaa

SEQ ID NO: 15978 - RNA, 19 nt, Artificial Sequence
  Synthetic
gaucauaacaccagaacaa

SEQ ID NO: 15979 - RNA, 19 nt, Artificial Sequence
  Synthetic
ggaaagagugaaagaacaa

SEQ ID NO: 15980 - RNA, 19 nt, Artificial Sequence
  Synthetic
ccauagaaauacaggaaaa

SEQ ID NO: 15981 - RNA, 19 nt, Artificial Sequence
  Synthetic
acauggagauuuugggaaa

SEQ ID NO: 15982 - RNA, 19 nt, Artificial Sequence
  Synthetic
uagaagagacagagggauu

SEQ ID NO: 15983 - RNA, 19 nt, Artificial Sequence
  Synthetic
aguuguagauggagaaauu

SEQ ID NO: 15984 - RNA, 19 nt, Artificial Sequence
  Synthetic
ggaaagaagaguugaugau

SEQ ID NO: 15985 - RNA, 19 nt, Artificial Sequence
  Synthetic
gcagauaaauccagcauca

SEQ ID NO: 15986 - RNA, 19 nt, Artificial Sequence
  Synthetic
ggaaaauggugaugccuua

SEQ ID NO: 15987 - RNA, 19 nt, Artificial Sequence
  Synthetic
gggaaugccaacacagaaa

SEQ ID NO: 15988 - RNA, 19 nt, Artificial Sequence
  Synthetic
ccaaauugcacuaguacua

SEQ ID NO: 15989 - RNA, 19 nt, Artificial Sequence
  Synthetic
gaucauaauacucgaacua

SEQ ID NO: 15990 - RNA, 19 nt, Artificial Sequence
  Synthetic
cgacauuauacaagaaaca

SEQ ID NO: 15991 - RNA, 19 nt, Artificial Sequence
  Synthetic
gauaguggcucuaguuuua

SEQ ID NO: 15992 - RNA, 19 nt, Artificial Sequence
  Synthetic
gagaagaaggacuugauua

SEQ ID NO: 15993 - RNA, 19 nt, Artificial Sequence
  Synthetic
uccaagaacucaaggcuua

SEQ ID NO: 15994 - RNA, 19 nt, Artificial Sequence
  Synthetic
uggcaaagacacuugguua

SEQ ID NO: 15995 - RNA, 19 nt, Artificial Sequence
  Synthetic
agaagaaggacuugauuau

SEQ ID NO: 15996 - RNA, 19 nt, Artificial Sequence
  Synthetic
caagaauggcauagcacaa

SEQ ID NO: 15997 - RNA, 19 nt, Artificial Sequence
  Synthetic
cauggaaaguuuaucgaua

SEQ ID NO: 15998 - RNA, 19 nt, Artificial Sequence
  Synthetic
gugccaaacuuaaaagaaa

SEQ ID NO: 15999 - RNA, 19 nt, Artificial Sequence
  Synthetic
uggcagauuggcagagaaa

SEQ ID NO: 16000 - RNA, 19 nt, Artificial Sequence
  Synthetic
ggguuuacuuugugaauca

SEQ ID NO: 16001 - RNA, 19 nt, Artificial Sequence
  Synthetic
uggaaagagugaaagaaca

SEQ ID NO: 16002 - RNA, 19 nt, Artificial Sequence
  Synthetic
uugcauggcuguucagaaa

SEQ ID NO: 16003 - RNA, 19 nt, Artificial Sequence
  Synthetic
ugaaagagacagacaauga

SEQ ID NO: 16004 - RNA, 19 nt, Artificial Sequence
  Synthetic
acaagaaacagcaagcaaa

SEQ ID NO: 16005 - RNA, 19 nt, Artificial Sequence
  Synthetic
gcacagauaguguauauaa

SEQ ID NO: 16006 - RNA, 19 nt, Artificial Sequence
  Synthetic
ugacaaaguuggcaaggaa

SEQ ID NO: 16007 - RNA, 19 nt, Artificial Sequence
  Synthetic
gcacagagucauuuagauu

SEQ ID NO: 16008 - RNA, 19 nt, Artificial Sequence
  Synthetic
caggaugggagaugaaaua

SEQ ID NO: 16009 - RNA, 19 nt, Artificial Sequence
  Synthetic
gaugaaacagaaaggcuaa

SEQ ID NO: 16010 - RNA, 19 nt, Artificial Sequence
  Synthetic
ccacagaaguuuugcauug

SEQ ID NO: 16011 - RNA, 19 nt, Artificial Sequence
  Synthetic
gcuacgaacagcugagaga

SEQ ID NO: 16012 - RNA, 19 nt, Artificial Sequence
  Synthetic
ggacaauggacggguguau

SEQ ID NO: 16013 - RNA, 19 nt, Artificial Sequence
  Synthetic
ugaaagugguguccgcaaa

SEQ ID NO: 16014 - RNA, 19 nt, Artificial Sequence
  Synthetic
uguauuacgugaaccauaa

SEQ ID NO: 16015 - RNA, 19 nt, Artificial Sequence
  Synthetic
guuaauucauucucagcaa

SEQ ID NO: 16016 - RNA, 19 nt, Artificial Sequence
  Synthetic
gcgcuacuuugacgagaaa

SEQ ID NO: 16017 - RNA, 19 nt, Artificial Sequence
  Synthetic
ccauugacccugaguucua

SEQ ID NO: 16018 - RNA, 19 nt, Artificial Sequence
  Synthetic
acaauggacggguguauua

SEQ ID NO: 16019 - RNA, 19 nt, Artificial Sequence
  Synthetic
ggauggcagucuggaauaa

SEQ ID NO: 16020 - RNA, 19 nt, Artificial Sequence
  Synthetic
ugaaggagauggacaacga

SEQ ID NO: 16021 - RNA, 19 nt, Artificial Sequence
  Synthetic
agaacaaccuggaagaaug

SEQ ID NO: 16022 - RNA, 19 nt, Artificial Sequence
  Synthetic
augcagcacuucagccaaa

SEQ ID NO: 16023 - RNA, 19 nt, Artificial Sequence
  Synthetic
cuugagaaaugaacugcua

SEQ ID NO: 16024 - RNA, 19 nt, Artificial Sequence
  Synthetic
gagaacaaccuggaagaau

SEQ ID NO: 16025 - RNA, 19 nt, Artificial Sequence
  Synthetic
ucuauuauguugaccacaa

SEQ ID NO: 16026 - RNA, 19 nt, Artificial Sequence
  Synthetic
gcaagcagauccagugguu

SEQ ID NO: 16027 - RNA, 19 nt, Artificial Sequence
  Synthetic
gaauaugccggaaagaaca

SEQ ID NO: 16028 - RNA, 19 nt, Artificial Sequence
  Synthetic
gcaacggaccacagaaguu

SEQ ID NO: 16029 - RNA, 19 nt, Artificial Sequence
  Synthetic
ggagaggaacccagcacuu

SEQ ID NO: 16030 - RNA, 19 nt, Artificial Sequence
  Synthetic
ugccauaccuugagaaaug

SEQ ID NO: 16031 - RNA, 19 nt, Artificial Sequence
  Synthetic
ccaauggcacagugaauga

SEQ ID NO: 16032 - RNA, 19 nt, Artificial Sequence
  Synthetic
agacuuuguccauguuaua

SEQ ID NO: 16033 - RNA, 19 nt, Artificial Sequence
  Synthetic
ugagagagaagcugcugua

SEQ ID NO: 16034 - RNA, 19 nt, Artificial Sequence
  Synthetic
acaucaugcugcugacuga

SEQ ID NO: 16035 - RNA, 19 nt, Artificial Sequence
  Synthetic
ccaagaacagcaagcagau

SEQ ID NO: 16036 - RNA, 19 nt, Artificial Sequence
  Synthetic
ggagauaguucuaggaguu

SEQ ID NO: 16037 - RNA, 19 nt, Artificial Sequence
  Synthetic
gaaaugauguucugugaua

SEQ ID NO: 16038 - RNA, 19 nt, Artificial Sequence
  Synthetic
ggaagaaagaagagcuuau

SEQ ID NO: 16039 - RNA, 19 nt, Artificial Sequence
  Synthetic
guaaagugccugaguauau

SEQ ID NO: 16040 - RNA, 19 nt, Artificial Sequence
  Synthetic
cuauaugcuucaagaacaa

SEQ ID NO: 16041 - RNA, 19 nt, Artificial Sequence
  Synthetic
cgaaugggcucaggagaua

SEQ ID NO: 16042 - RNA, 19 nt, Artificial Sequence
  Synthetic
gcgaaugggcucaggagau

SEQ ID NO: 16043 - RNA, 19 nt, Artificial Sequence
  Synthetic
agacagugauggugauuca

SEQ ID NO: 16044 - RNA, 19 nt, Artificial Sequence
  Synthetic
gguaaggaguccaacaaga

SEQ ID NO: 16045 - RNA, 19 nt, Artificial Sequence
  Synthetic
uggaauauuuggugccauu

SEQ ID NO: 16046 - RNA, 19 nt, Artificial Sequence
  Synthetic
gcagaaaacuugauagagu

SEQ ID NO: 16047 - RNA, 19 nt, Artificial Sequence
  Synthetic
agccaaaggucauuccaaa

SEQ ID NO: 16048 - RNA, 19 nt, Artificial Sequence
  Synthetic
gugaugaagugauugauuu

SEQ ID NO: 16049 - RNA, 19 nt, Artificial Sequence
  Synthetic
gaucaugaauggaggaaua

SEQ ID NO: 16050 - RNA, 19 nt, Artificial Sequence
  Synthetic
gcagcaagcucaagaagaa

SEQ ID NO: 16051 - RNA, 19 nt, Artificial Sequence
  Synthetic
ugaaaguacuugaggauca

SEQ ID NO: 16052 - RNA, 19 nt, Artificial Sequence
  Synthetic
agaaggaggcagagaggaa

SEQ ID NO: 16053 - RNA, 19 nt, Artificial Sequence
  Synthetic
aggaaaugauccagcgcua

SEQ ID NO: 16054 - RNA, 19 nt, Artificial Sequence
  Synthetic
cguuugaacugguggguga

SEQ ID NO: 16055 - RNA, 19 nt, Artificial Sequence
  Synthetic
ccagcagaguccagggcaa

SEQ ID NO: 16056 - RNA, 19 nt, Artificial Sequence
  Synthetic
ccauggagcagaaggagaa

SEQ ID NO: 16057 - RNA, 19 nt, Artificial Sequence
  Synthetic
gcugaaaguacuugaggau

SEQ ID NO: 16058 - RNA, 19 nt, Artificial Sequence
  Synthetic
ggacaagaagagagcagau

SEQ ID NO: 16059 - RNA, 19 nt, Artificial Sequence
  Synthetic
cagcagacacagcagaaua

SEQ ID NO: 16060 - RNA, 19 nt, Artificial Sequence
  Synthetic
acuuacagauucagaguau

SEQ ID NO: 16061 - RNA, 19 nt, Artificial Sequence
  Synthetic
gggacaggguugggaggaa

SEQ ID NO: 16062 - RNA, 19 nt, Artificial Sequence
  Synthetic
ccauagucgucguggcaga

SEQ ID NO: 16063 - RNA, 19 nt, Artificial Sequence
  Synthetic
aggagaagucaaagcgaga

SEQ ID NO: 16064 - RNA, 19 nt, Artificial Sequence
  Synthetic
gggacuugaugcugcggaa

SEQ ID NO: 16065 - RNA, 19 nt, Artificial Sequence
  Synthetic
gcagcuucauagagagaga

SEQ ID NO: 16066 - RNA, 19 nt, Artificial Sequence
  Synthetic
ggagaauaccaaggaacaa

SEQ ID NO: 16067 - RNA, 19 nt, Artificial Sequence
  Synthetic
aggagaauaccaaggaaca

SEQ ID NO: 16068 - RNA, 19 nt, Artificial Sequence
  Synthetic
cgaagaggcaggaagacaa

SEQ ID NO: 16069 - RNA, 19 nt, Artificial Sequence
  Synthetic
ggaagaaagaggcggagga

SEQ ID NO: 16070 - RNA, 19 nt, Artificial Sequence
  Synthetic
agacagacucgaaaggcaa

SEQ ID NO: 16071 - RNA, 19 nt, Artificial Sequence
  Synthetic
cggcgaagaggcaggaaga

SEQ ID NO: 16072 - RNA, 19 nt, Artificial Sequence
  Synthetic
gcgaagaggcaggaagaca

SEQ ID NO: 16073 - RNA, 19 nt, Artificial Sequence
  Synthetic
cgguagagucagucauaga

SEQ ID NO: 16074 - RNA, 19 nt, Artificial Sequence
  Synthetic
cagcaaggaucccugggua

SEQ ID NO: 16075 - RNA, 19 nt, Artificial Sequence
  Synthetic
gagacagacucgaaaggca

SEQ ID NO: 16076 - RNA, 19 nt, Artificial Sequence
  Synthetic
ccccaaaccuggagggcau

SEQ ID NO: 16077 - RNA, 19 nt, Artificial Sequence
  Synthetic
uggaggugcaggugaagaa

SEQ ID NO: 16078 - RNA, 19 nt, Artificial Sequence
  Synthetic
ccuacuaccacaacagcaa

SEQ ID NO: 16079 - RNA, 19 nt, Artificial Sequence
  Synthetic
accuggaacaaguggacaa

SEQ ID NO: 16080 - RNA, 19 nt, Artificial Sequence
  Synthetic
ccaaguacgacgaggcuac

SEQ ID NO: 16081 - RNA, 19 nt, Artificial Sequence
  Synthetic
cugcuuaugugcuggggaa

SEQ ID NO: 16082 - RNA, 19 nt, Artificial Sequence
  Synthetic
gccgacgacugaauaauaa

SEQ ID NO: 16083 - RNA, 19 nt, Artificial Sequence
  Synthetic
gccuuaagugucaggaaca

SEQ ID NO: 16084 - RNA, 19 nt, Artificial Sequence
  Synthetic
gcaagugugagaacggaga

SEQ ID NO: 16085 - RNA, 19 nt, Artificial Sequence
  Synthetic
ucagggagcuucaggccau

SEQ ID NO: 16086 - RNA, 19 nt, Artificial Sequence
  Synthetic
ggaucaaauucuaauggaa

SEQ ID NO: 16087 - RNA, 19 nt, Artificial Sequence
  Synthetic
ggaaauacacauuaugcua

SEQ ID NO: 16088 - RNA, 19 nt, Artificial Sequence
  Synthetic
ucacaauucuccaggaaca

SEQ ID NO: 16089 - RNA, 19 nt, Artificial Sequence
  Synthetic
ucaagaagcugaagaccau

SEQ ID NO: 16090 - RNA, 19 nt, Artificial Sequence
  Synthetic
gaaauuuauccuagcaaga

SEQ ID NO: 16091 - RNA, 19 nt, Artificial Sequence
  Synthetic
gagcuugguucuaguuaau

SEQ ID NO: 16092 - RNA, 19 nt, Artificial Sequence
  Synthetic
agucaaugccaauaacuua

SEQ ID NO: 16093 - RNA, 19 nt, Artificial Sequence
  Synthetic
ugucagaaguguauugaua

SEQ ID NO: 16094 - RNA, 19 nt, Artificial Sequence
  Synthetic
gaaacuaugugaagcaaca

SEQ ID NO: 16095 - RNA, 19 nt, Artificial Sequence
  Synthetic
cugaagaugauauggcuaa

SEQ ID NO: 16096 - RNA, 19 nt, Artificial Sequence
  Synthetic
ccaugaccuugaagugaaa

SEQ ID NO: 16097 - RNA, 19 nt, Artificial Sequence
  Synthetic
cuccuuaacuuaugaagaa

SEQ ID NO: 16098 - RNA, 19 nt, Artificial Sequence
  Synthetic
gaagcaacacucuggauuu

SEQ ID NO: 16099 - RNA, 19 nt, Artificial Sequence
  Synthetic
gccaugaccuugaagugaa

SEQ ID NO: 16100 - RNA, 19 nt, Artificial Sequence
  Synthetic
uuaaugauguaacggcuaa

SEQ ID NO: 16101 - RNA, 19 nt, Artificial Sequence
  Synthetic
cgagagaguggcuccuuaa

SEQ ID NO: 16102 - RNA, 19 nt, Artificial Sequence
  Synthetic
gaacagugccuuuuacaaa

SEQ ID NO: 16103 - RNA, 19 nt, Artificial Sequence
  Synthetic
uguugaauguccagaaauu

SEQ ID NO: 16104 - RNA, 19 nt, Artificial Sequence
  Synthetic
cuggaagacuuauguuaua

SEQ ID NO: 16105 - RNA, 19 nt, Artificial Sequence
  Synthetic
cuucagacccaaagcuuua

SEQ ID NO: 16106 - RNA, 19 nt, Artificial Sequence
  Synthetic
caucauuuaucuuguggaa

SEQ ID NO: 16107 - RNA, 19 nt, Artificial Sequence
  Synthetic
ccacuggagucucaauaaa

SEQ ID NO: 16108 - RNA, 19 nt, Artificial Sequence
  Synthetic
ggaccaaccagauuaauuu

SEQ ID NO: 16109 - RNA, 19 nt, Artificial Sequence
  Synthetic
ucugagugaugaugagauu

SEQ ID NO: 16110 - RNA, 19 nt, Artificial Sequence
  Synthetic
ggaggagggcuaaggcuuu

SEQ ID NO: 16111 - RNA, 19 nt, Artificial Sequence
  Synthetic
ccacaggaaacaaacuuua

SEQ ID NO: 16112 - RNA, 19 nt, Artificial Sequence
  Synthetic
ccagaaauugcuaagaaca

SEQ ID NO: 16113 - RNA, 19 nt, Artificial Sequence
  Synthetic
guccagaaauugcuaagaa

SEQ ID NO: 16114 - RNA, 19 nt, Artificial Sequence
  Synthetic
ggaaucaugcaucggacua

SEQ ID NO: 16115 - RNA, 19 nt, Artificial Sequence
  Synthetic
acgagccacugaaggaaua

SEQ ID NO: 16116 - RNA, 19 nt, Artificial Sequence
  Synthetic
caauaaagcucugcaccau

SEQ ID NO: 16117 - RNA, 19 nt, Artificial Sequence
  Synthetic
gcuggaagacuuauguuau

SEQ ID NO: 16118 - RNA, 19 nt, Artificial Sequence
  Synthetic
guuguugaauguccagaaa

SEQ ID NO: 16119 - RNA, 19 nt, Artificial Sequence
  Synthetic
uauaggagucaguuagaau

SEQ ID NO: 16120 - RNA, 19 nt, Artificial Sequence
  Synthetic
ggaagaggguacagcuuug

SEQ ID NO: 16121 - RNA, 19 nt, Artificial Sequence
  Synthetic
gaggagggcuaaggcuuua

SEQ ID NO: 16122 - RNA, 19 nt, Artificial Sequence
  Synthetic
gauuccaacuggcugcaua

SEQ ID NO: 16123 - RNA, 19 nt, Artificial Sequence
  Synthetic
ggaaacaaacuuuaugugu

SEQ ID NO: 16124 - RNA, 19 nt, Artificial Sequence
  Synthetic
caacaagaauacacggaaa

SEQ ID NO: 16125 - RNA, 19 nt, Artificial Sequence
  Synthetic
cggaacaguuaguggauuu

SEQ ID NO: 16126 - RNA, 19 nt, Artificial Sequence
  Synthetic
gcacaauaacguggagaaa

SEQ ID NO: 16127 - RNA, 19 nt, Artificial Sequence
  Synthetic
caaggaagauaaaggaaga

SEQ ID NO: 16128 - RNA, 19 nt, Artificial Sequence
  Synthetic
gaacagagccugaccaaga

SEQ ID NO: 16129 - RNA, 19 nt, Artificial Sequence
  Synthetic
agguggagcugcagaagaa

SEQ ID NO: 16130 - RNA, 19 nt, Artificial Sequence
  Synthetic
agaagagggucaacagcaa

SEQ ID NO: 16131 - RNA, 19 nt, Artificial Sequence
  Synthetic
gcaaauguucccagcacaa

SEQ ID NO: 16132 - RNA, 19 nt, Artificial Sequence
  Synthetic
caacaaagccagucuacau

SEQ ID NO: 16133 - RNA, 19 nt, Artificial Sequence
  Synthetic
ucccaagacccuagugaaa

SEQ ID NO: 16134 - RNA, 19 nt, Artificial Sequence
  Synthetic
gcagaacucuccuuggaua

SEQ ID NO: 16135 - RNA, 19 nt, Artificial Sequence
  Synthetic
gcaacgugguggagcaguu

SEQ ID NO: 16136 - RNA, 19 nt, Artificial Sequence
  Synthetic
ggaaaagaaauccaagaaa

SEQ ID NO: 16137 - RNA, 19 nt, Artificial Sequence
  Synthetic
ugaagaaggucuccaaaga

SEQ ID NO: 16138 - RNA, 19 nt, Artificial Sequence
  Synthetic
aagaauacacggaaaugaa

SEQ ID NO: 16139 - RNA, 19 nt, Artificial Sequence
  Synthetic
gggaugaguucgaguuucu

SEQ ID NO: 16140 - RNA, 19 nt, Artificial Sequence
  Synthetic
gcggaugacugcaaacaga

SEQ ID NO: 16141 - RNA, 19 nt, Artificial Sequence
  Synthetic
ggaugacugcaaacagaaa

SEQ ID NO: 16142 - RNA, 19 nt, Artificial Sequence
  Synthetic
gggcagaaccagagagaug

SEQ ID NO: 16143 - RNA, 19 nt, Artificial Sequence
  Synthetic
aaacagagcuucaugggaa

SEQ ID NO: 16144 - RNA, 19 nt, Artificial Sequence
  Synthetic
ggaagaagguggcgguguu

SEQ ID NO: 16145 - RNA, 19 nt, Artificial Sequence
  Synthetic
agagggaguucgaggagua

SEQ ID NO: 16146 - RNA, 19 nt, Artificial Sequence
  Synthetic
cccaaaugcgaaagaauaa

SEQ ID NO: 16147 - RNA, 19 nt, Artificial Sequence
  Synthetic
uggagaaggaggaggauga

SEQ ID NO: 16148 - RNA, 19 nt, Artificial Sequence
  Synthetic
gcccaaaugcgaaagaaua

SEQ ID NO: 16149 - RNA, 19 nt, Artificial Sequence
  Synthetic
uggccgaggugaugggcaa

SEQ ID NO: 16150 - RNA, 19 nt, Artificial Sequence
  Synthetic
guaagaagaugcagcuuga

SEQ ID NO: 16151 - RNA, 19 nt, Artificial Sequence
  Synthetic
uaugaaacuuacaggguau

SEQ ID NO: 16152 - RNA, 19 nt, Artificial Sequence
  Synthetic
ccucuuaguucgugacuca

SEQ ID NO: 16153 - RNA, 19 nt, Artificial Sequence
  Synthetic
uuggcaaacgggagagaaa

SEQ ID NO: 16154 - RNA, 19 nt, Artificial Sequence
  Synthetic
gccaagaggaggagaggca

SEQ ID NO: 16155 - RNA, 19 nt, Artificial Sequence
  Synthetic
ggaaagaagggaagaaggu

SEQ ID NO: 16156 - RNA, 19 nt, Artificial Sequence
  Synthetic
ggaagauaugcaagcagaa

SEQ ID NO: 16157 - RNA, 19 nt, Artificial Sequence
  Synthetic
cggaagauaugcaagcaga

SEQ ID NO: 16158 - RNA, 19 nt, Artificial Sequence
  Synthetic
gcaccauccuggaagucua

SEQ ID NO: 16159 - RNA, 19 nt, Artificial Sequence
  Synthetic
gcauggagaaggaggagga

SEQ ID NO: 16160 - RNA, 19 nt, Artificial Sequence
  Synthetic
gggcaagcauuaugggaug

SEQ ID NO: 16161 - RNA, 19 nt, Artificial Sequence
  Synthetic
gacccuggauuguaggaaa

SEQ ID NO: 16162 - RNA, 19 nt, Artificial Sequence
  Synthetic
aaacugacuucuaggcuau

SEQ ID NO: 16163 - RNA, 19 nt, Artificial Sequence
  Synthetic
ccaucugccuggagagguu

SEQ ID NO: 16164 - RNA, 19 nt, Artificial Sequence
  Synthetic
ccugagugccggaagauau

SEQ ID NO: 16165 - RNA, 19 nt, Artificial Sequence
  Synthetic
ucccaggagcugaaggaua

SEQ ID NO: 16166 - RNA, 19 nt, Artificial Sequence
  Synthetic
ugaacaacuucuacccuua

SEQ ID NO: 16167 - RNA, 19 nt, Artificial Sequence
  Synthetic
gugagaagccccaggauga

SEQ ID NO: 16168 - RNA, 19 nt, Artificial Sequence
  Synthetic
aggugaugggcaagcauua

SEQ ID NO: 16169 - RNA, 19 nt, Artificial Sequence
  Synthetic
aacagagcuucaugggaaa

SEQ ID NO: 16170 - RNA, 19 nt, Artificial Sequence
  Synthetic
gcauauggauguggagcca

SEQ ID NO: 16171 - RNA, 19 nt, Artificial Sequence
  Synthetic
gcuaugaaacugacuucua

SEQ ID NO: 16172 - RNA, 19 nt, Artificial Sequence
  Synthetic
gcgaagaggaagaggaaaa

SEQ ID NO: 16173 - RNA, 19 nt, Artificial Sequence
  Synthetic
cgaaagaauugauugcuaa

SEQ ID NO: 16174 - RNA, 19 nt, Artificial Sequence
  Synthetic
gcgaaagaauugauugcua

SEQ ID NO: 16175 - RNA, 19 nt, Artificial Sequence
  Synthetic
caggaaaggcgguggauca

SEQ ID NO: 16176 - RNA, 19 nt, Artificial Sequence
  Synthetic
ggagaaagcggcagcagua

SEQ ID NO: 16177 - RNA, 19 nt, Artificial Sequence
  Synthetic
gggaagcgaugaugaggaa

SEQ ID NO: 16178 - RNA, 19 nt, Artificial Sequence
  Synthetic
agaaauacaugaagcccaa

SEQ ID NO: 16179 - RNA, 19 nt, Artificial Sequence
  Synthetic
cagcgaagaggaagaggaa

SEQ ID NO: 16180 - RNA, 19 nt, Artificial Sequence
  Synthetic
cuagagaagcaucgagcua

SEQ ID NO: 16181 - RNA, 19 nt, Artificial Sequence
  Synthetic
cgucuucaauccagcgaaa

SEQ ID NO: 16182 - RNA, 19 nt, Artificial Sequence
  Synthetic
guaaacagaaggcggcuua

SEQ ID NO: 16183 - RNA, 19 nt, Artificial Sequence
  Synthetic
gaagcgaugaugaggaaau

SEQ ID NO: 16184 - RNA, 19 nt, Artificial Sequence
  Synthetic
aggcauuauuucugcgaga

SEQ ID NO: 16185 - RNA, 19 nt, Artificial Sequence
  Synthetic
acacagagaaagagcgcga

SEQ ID NO: 16186 - RNA, 19 nt, Artificial Sequence
  Synthetic
gcaaggaggaugacaagau

SEQ ID NO: 16187 - RNA, 19 nt, Artificial Sequence
  Synthetic
ccgugggaccagaggauau

SEQ ID NO: 16188 - RNA, 19 nt, Artificial Sequence
  Synthetic
agaaagagcgcgaugcaca

SEQ ID NO: 16189 - RNA, 19 nt, Artificial Sequence
  Synthetic
agagaagcaucgagcuaca

SEQ ID NO: 16190 - RNA, 19 nt, Artificial Sequence
  Synthetic
cggcagcaguagcgacgaa

SEQ ID NO: 16191 - RNA, 19 nt, Artificial Sequence
  Synthetic
gaaagagcgcgaugcacaa

SEQ ID NO: 16192 - RNA, 19 nt, Artificial Sequence
  Synthetic
ugagcuggacacagagaaa

SEQ ID NO: 16193 - RNA, 19 nt, Artificial Sequence
  Synthetic
ggaaauaccauucaagugu

SEQ ID NO: 16194 - RNA, 19 nt, Artificial Sequence
  Synthetic
gccagaagauccaggagga

SEQ ID NO: 16195 - RNA, 19 nt, Artificial Sequence
  Synthetic
aggaggaugacaagaucua

SEQ ID NO: 16196 - RNA, 19 nt, Artificial Sequence
  Synthetic
gcagaucgaacgugagcuu

SEQ ID NO: 16197 - RNA, 19 nt, Artificial Sequence
  Synthetic
ucuaugagcuggacacaga

SEQ ID NO: 16198 - RNA, 19 nt, Artificial Sequence
  Synthetic
uuacuuagguuucccauaa

SEQ ID NO: 16199 - RNA, 19 nt, Artificial Sequence
  Synthetic
aagcgaugaugaggaaaua

SEQ ID NO: 16200 - RNA, 19 nt, Artificial Sequence
  Synthetic
cagaaauacaugaagccca

SEQ ID NO: 16201 - RNA, 19 nt, Artificial Sequence
  Synthetic
acaugaagcccaaggauac

SEQ ID NO: 16202 - RNA, 19 nt, Artificial Sequence
  Synthetic
ccaaagaacugauggcgaa

SEQ ID NO: 16203 - RNA, 19 nt, Artificial Sequence
  Synthetic
gaagcgaggaagaggaaau

SEQ ID NO: 16204 - RNA, 19 nt, Artificial Sequence
  Synthetic
gggaagcgaggaagaggaa

SEQ ID NO: 16205 - RNA, 19 nt, Artificial Sequence
  Synthetic
ggaaauaccauucaggugu

SEQ ID NO: 16206 - RNA, 19 nt, Artificial Sequence
  Synthetic
ugaagugggaagcgaggaa

SEQ ID NO: 16207 - RNA, 19 nt, Artificial Sequence
  Synthetic
cgaccaagcagaccaggua

SEQ ID NO: 16208 - RNA, 19 nt, Artificial Sequence
  Synthetic
ccgcugacuucgagcagga

SEQ ID NO: 16209 - RNA, 19 nt, Artificial Sequence
  Synthetic
aggaagaggaaauaccauu

SEQ ID NO: 16210 - RNA, 19 nt, Artificial Sequence
  Synthetic
ugagguaccugaagcccaa

SEQ ID NO: 16211 - RNA, 19 nt, Artificial Sequence
  Synthetic
caaagaacugauggcgaaa

SEQ ID NO: 16212 - RNA, 19 nt, Artificial Sequence
  Synthetic
ugcaaggacuacaaggaga

SEQ ID NO: 16213 - RNA, 19 nt, Artificial Sequence
  Synthetic
agauugaacgggagcuuga

SEQ ID NO: 16214 - RNA, 19 nt, Artificial Sequence
  Synthetic
ccauucagguguuucauau

SEQ ID NO: 16215 - RNA, 19 nt, Artificial Sequence
  Synthetic
ggugggagauugaacggga

SEQ ID NO: 16216 - RNA, 19 nt, Artificial Sequence
  Synthetic
ggagauugaacgggagcuu

SEQ ID NO: 16217 - RNA, 19 nt, Artificial Sequence
  Synthetic
gggcugcaggccucagaaa

SEQ ID NO: 16218 - RNA, 19 nt, Artificial Sequence
  Synthetic
gaaauaccauucagguguu

SEQ ID NO: 16219 - RNA, 19 nt, Artificial Sequence
  Synthetic
ccacugugcgcugggauua

SEQ ID NO: 16220 - RNA, 19 nt, Artificial Sequence
  Synthetic
aagcgaggaagaggaaaua

SEQ ID NO: 16221 - RNA, 19 nt, Artificial Sequence
  Synthetic
gggagcacgaccacaucua

SEQ ID NO: 16222 - RNA, 19 nt, Artificial Sequence
  Synthetic
ucaccaagugcaggcauua

SEQ ID NO: 16223 - RNA, 19 nt, Artificial Sequence
  Synthetic
gaagagggucgcuacugua

SEQ ID NO: 16224 - RNA, 19 nt, Artificial Sequence
  Synthetic
gggauuaccagccugacau

SEQ ID NO: 16225 - RNA, 19 nt, Artificial Sequence
  Synthetic
ggaagaggaaauaccauuc

SEQ ID NO: 16226 - RNA, 19 nt, Artificial Sequence
  Synthetic
cgaggaagaggaaauacca

SEQ ID NO: 16227 - RNA, 19 nt, Artificial Sequence
  Synthetic
gcgccaccuucuccaggaa

SEQ ID NO: 16228 - RNA, 19 nt, Artificial Sequence
  Synthetic
ggacgaaaaccaugaagug

SEQ ID NO: 16229 - RNA, 19 nt, Artificial Sequence
  Synthetic
ugaagagggucgcuacugu

SEQ ID NO: 16230 - RNA, 19 nt, Artificial Sequence
  Synthetic
gaagaggaaauaccauuca

SEQ ID NO: 16231 - RNA, 19 nt, Artificial Sequence
  Synthetic
ggguggaggugguggaaga

SEQ ID NO: 16232 - RNA, 19 nt, Artificial Sequence
  Synthetic
gcugaugacucguggacaa

SEQ ID NO: 16233 - RNA, 19 nt, Artificial Sequence
  Synthetic
gcugauaggaagagcaaca

SEQ ID NO: 16234 - RNA, 19 nt, Artificial Sequence
  Synthetic
ugcaagacauugaaagaaa

SEQ ID NO: 16235 - RNA, 19 nt, Artificial Sequence
  Synthetic
gaugaucccugguggguaa

SEQ ID NO: 16236 - RNA, 19 nt, Artificial Sequence
  Synthetic
gguaaagaggcccaagaua

SEQ ID NO: 16237 - RNA, 19 nt, Artificial Sequence
  Synthetic
aagaacaaccuuagaguau

SEQ ID NO: 16238 - RNA, 19 nt, Artificial Sequence
  Synthetic
gaacaaccuuagaguauuu

SEQ ID NO: 16239 - RNA, 19 nt, Artificial Sequence
  Synthetic
gauaauugcuugugugugu

SEQ ID NO: 16240 - RNA, 19 nt, Artificial Sequence
  Synthetic
augcaaaggcagacccaaa

SEQ ID NO: 16241 - RNA, 19 nt, Artificial Sequence
  Synthetic
caccauucacugugggaaa

SEQ ID NO: 16242 - RNA, 19 nt, Artificial Sequence
  Synthetic
gaggaagagggaugcauua

SEQ ID NO: 16243 - RNA, 19 nt, Artificial Sequence
  Synthetic
ccacugaggauuacaagaa

SEQ ID NO: 16244 - RNA, 19 nt, Artificial Sequence
  Synthetic
ccaaagaggagcuugugaa

SEQ ID NO: 16245 - RNA, 19 nt, Artificial Sequence
  Synthetic
gagcagaaggugugaaauc

SEQ ID NO: 16246 - RNA, 19 nt, Artificial Sequence
  Synthetic
gaggacaacuggagggauc

SEQ ID NO: 16247 - RNA, 19 nt, Artificial Sequence
  Synthetic
aggaggagguggugccauu

SEQ ID NO: 16248 - RNA, 19 nt, Artificial Sequence
  Synthetic
gcaguaaaccgaugggcga

SEQ ID NO: 16249 - RNA, 19 nt, Artificial Sequence
  Synthetic
gggccaaguugaagacugu

SEQ ID NO: 16250 - RNA, 19 nt, Artificial Sequence
  Synthetic
gcaagacauugaaagaaau

SEQ ID NO: 16251 - RNA, 19 nt, Artificial Sequence
  Synthetic
aaagauuacccuagaacau

SEQ ID NO: 16252 - RNA, 19 nt, Artificial Sequence
  Synthetic
ccaaggagacccagcugua

SEQ ID NO: 16253 - RNA, 19 nt, Artificial Sequence
  Synthetic
ggaaggauguggccaccaa

SEQ ID NO: 16254 - RNA, 19 nt, Artificial Sequence
  Synthetic
gaaccaacaugcaagacau

SEQ ID NO: 16255 - RNA, 19 nt, Artificial Sequence
  Synthetic
guguuuagcuugucuauuu

SEQ ID NO: 16256 - RNA, 19 nt, Artificial Sequence
  Synthetic
guugaagacuguugaugau

SEQ ID NO: 16257 - RNA, 19 nt, Artificial Sequence
  Synthetic
cgagagaguuguggcagua

SEQ ID NO: 16258 - RNA, 19 nt, Artificial Sequence
  Synthetic
gggcauguacccacacuaa

SEQ ID NO: 16259 - RNA, 19 nt, Artificial Sequence
  Synthetic
aggaggaggaggaggagga

SEQ ID NO: 16260 - RNA, 19 nt, Artificial Sequence
  Synthetic
cgaagaggguggagguggu

SEQ ID NO: 16261 - RNA, 19 nt, Artificial Sequence
  Synthetic
aggcagaauuggauagaua

SEQ ID NO: 16262 - RNA, 19 nt, Artificial Sequence
  Synthetic
ggaauguaaucaagguaua

SEQ ID NO: 16263 - RNA, 19 nt, Artificial Sequence
  Synthetic
acaacagggucuugagaua

SEQ ID NO: 16264 - RNA, 19 nt, Artificial Sequence
  Synthetic
cugcagauguguacagaua

SEQ ID NO: 16265 - RNA, 19 nt, Artificial Sequence
  Synthetic
caucuaaagcugucaaaua

SEQ ID NO: 16266 - RNA, 19 nt, Artificial Sequence
  Synthetic
cgaaacugguuauaaguaa

SEQ ID NO: 16267 - RNA, 19 nt, Artificial Sequence
  Synthetic
aggaagaaaugcucauaaa

SEQ ID NO: 16268 - RNA, 19 nt, Artificial Sequence
  Synthetic
uugcaaagguaucugaaua

SEQ ID NO: 16269 - RNA, 19 nt, Artificial Sequence
  Synthetic
cagaacugcacuaggauua

SEQ ID NO: 16270 - RNA, 19 nt, Artificial Sequence
  Synthetic
gugaagagacugaaacuuu

SEQ ID NO: 16271 - RNA, 19 nt, Artificial Sequence
  Synthetic
gaagaaaugcucauaaaga

SEQ ID NO: 16272 - RNA, 19 nt, Artificial Sequence
  Synthetic
cugcauuacucauugcuaa

SEQ ID NO: 16273 - RNA, 19 nt, Artificial Sequence
  Synthetic
gcacagaacugcacuagga

SEQ ID NO: 16274 - RNA, 19 nt, Artificial Sequence
  Synthetic
ggauguggcuuuuauggaa

SEQ ID NO: 16275 - RNA, 19 nt, Artificial Sequence
  Synthetic
agauaaccuuugaagcuua

SEQ ID NO: 16276 - RNA, 19 nt, Artificial Sequence
  Synthetic
caaaauaguggcagaauga

SEQ ID NO: 16277 - RNA, 19 nt, Artificial Sequence
  Synthetic
cugaauugcccaaaccaaa

SEQ ID NO: 16278 - RNA, 19 nt, Artificial Sequence
  Synthetic
uauggaaauccuaggacaa

SEQ ID NO: 16279 - RNA, 19 nt, Artificial Sequence
  Synthetic
ccauauauaagccugguua

SEQ ID NO: 16280 - RNA, 19 nt, Artificial Sequence
  Synthetic
acucagcaaaugacagaaa

SEQ ID NO: 16281 - RNA, 19 nt, Artificial Sequence
  Synthetic
aaagugaaacacacagaua

SEQ ID NO: 16282 - RNA, 19 nt, Artificial Sequence
  Synthetic
gcagaaagaaaguuggucu

SEQ ID NO: 16283 - RNA, 19 nt, Artificial Sequence
  Synthetic
cuucagaggcagcaaaaua

SEQ ID NO: 16284 - RNA, 19 nt, Artificial Sequence
  Synthetic
gcauuucaagagaggacaa

SEQ ID NO: 16285 - RNA, 19 nt, Artificial Sequence
  Synthetic
guguacagauaguucauau

SEQ ID NO: 16286 - RNA, 19 nt, Artificial Sequence
  Synthetic
caaauaagacauucuguga

SEQ ID NO: 16287 - RNA, 19 nt, Artificial Sequence
  Synthetic
gauguggcuuuuauggaaa

SEQ ID NO: 16288 - RNA, 19 nt, Artificial Sequence
  Synthetic
gcagauguguacagauagu

SEQ ID NO: 16289 - RNA, 19 nt, Artificial Sequence
  Synthetic
gcagcaaaauaguggcaga

SEQ ID NO: 16290 - RNA, 19 nt, Artificial Sequence
  Synthetic
caacagggucuugagauaa

SEQ ID NO: 16291 - RNA, 19 nt, Artificial Sequence
  Synthetic
gaacaggagugaugauaaa

SEQ ID NO: 16292 - RNA, 19 nt, Artificial Sequence
  Synthetic
caacaaagaaggccagaaa

SEQ ID NO: 16293 - RNA, 19 nt, Artificial Sequence
  Synthetic
ccaauggucuuuagaaaua

SEQ ID NO: 16294 - RNA, 19 nt, Artificial Sequence
  Synthetic
cugccagagcugugggaaa

SEQ ID NO: 16295 - RNA, 19 nt, Artificial Sequence
  Synthetic
gcacggagaugcugcacaa

SEQ ID NO: 16296 - RNA, 19 nt, Artificial Sequence
  Synthetic
gguugcgguucaagagaaa

SEQ ID NO: 16297 - RNA, 19 nt, Artificial Sequence
  Synthetic
gaaccaaacuaaugaguag

SEQ ID NO: 16298 - RNA, 19 nt, Artificial Sequence
  Synthetic
ggguaggcgacgagagcuu

SEQ ID NO: 16299 - RNA, 19 nt, Artificial Sequence
  Synthetic
ucccaauggucuuuagaaa

SEQ ID NO: 16300 - RNA, 19 nt, Artificial Sequence
  Synthetic
uggcagaccaccugaagaa

SEQ ID NO: 16301 - RNA, 19 nt, Artificial Sequence
  Synthetic
cgaaagaggagccggacca

SEQ ID NO: 16302 - RNA, 19 nt, Artificial Sequence
  Synthetic
ggaacuagccaccagcuua

SEQ ID NO: 16303 - RNA, 19 nt, Artificial Sequence
  Synthetic
guugauuguuugaagucua

SEQ ID NO: 16304 - RNA, 19 nt, Artificial Sequence
  Synthetic
cacauuaggguuaguauua

SEQ ID NO: 16305 - RNA, 19 nt, Artificial Sequence
  Synthetic
agagaagacuggcacaauu

SEQ ID NO: 16306 - RNA, 19 nt, Artificial Sequence
  Synthetic
gcugggaaaugcugugaau

SEQ ID NO: 16307 - RNA, 19 nt, Artificial Sequence
  Synthetic
acaaagaaggccagaaaug

SEQ ID NO: 16308 - RNA, 19 nt, Artificial Sequence
  Synthetic
gcagguggcuugugagauc

SEQ ID NO: 16309 - RNA, 19 nt, Artificial Sequence
  Synthetic
uaguagauccugagguuga

SEQ ID NO: 16310 - RNA, 19 nt, Artificial Sequence
  Synthetic
ugaacaggagugaugauaa

SEQ ID NO: 16311 - RNA, 19 nt, Artificial Sequence
  Synthetic
gcaugcagccagaggagga

SEQ ID NO: 16312 - RNA, 19 nt, Artificial Sequence
  Synthetic
ccucgaguccuuuggguuu

SEQ ID NO: 16313 - RNA, 19 nt, Artificial Sequence
  Synthetic
cugcugaugaggucgguua

SEQ ID NO: 16314 - RNA, 19 nt, Artificial Sequence
  Synthetic
ccauggagcgggugaacga

SEQ ID NO: 16315 - RNA, 19 nt, Artificial Sequence
  Synthetic
augauggguccgugggcaa

SEQ ID NO: 16316 - RNA, 19 nt, Artificial Sequence
  Synthetic
ggaccuauggcaacaaaga

SEQ ID NO: 16317 - RNA, 19 nt, Artificial Sequence
  Synthetic
ggguugcgguucaagagaa

SEQ ID NO: 16318 - RNA, 19 nt, Artificial Sequence
  Synthetic
acuaucagcuccaagguau

SEQ ID NO: 16319 - RNA, 19 nt, Artificial Sequence
  Synthetic
ggaaccaaacuaaugagua

SEQ ID NO: 16320 - RNA, 19 nt, Artificial Sequence
  Synthetic
uaaccgagaaggccagaaa

SEQ ID NO: 16321 - RNA, 19 nt, Artificial Sequence
  Synthetic
ggaagaaagagaagcuaaa

SEQ ID NO: 16322 - RNA, 19 nt, Artificial Sequence
  Synthetic
agccaaaccucuugaaaua

SEQ ID NO: 16323 - RNA, 19 nt, Artificial Sequence
  Synthetic
cgauauccuuggugagaaa

SEQ ID NO: 16324 - RNA, 19 nt, Artificial Sequence
  Synthetic
aggcuuagcuuuauggaaa

SEQ ID NO: 16325 - RNA, 19 nt, Artificial Sequence
  Synthetic
cagcugaguauuagagaaa

SEQ ID NO: 16326 - RNA, 19 nt, Artificial Sequence
  Synthetic
cagaauaaguuuuggaagu

SEQ ID NO: 16327 - RNA, 19 nt, Artificial Sequence
  Synthetic
aauaguagaaagugggaaa

SEQ ID NO: 16328 - RNA, 19 nt, Artificial Sequence
  Synthetic
agaaagagcaugaagauau

SEQ ID NO: 16329 - RNA, 19 nt, Artificial Sequence
  Synthetic
ucaaggagcugaagaaauu

SEQ ID NO: 16330 - RNA, 19 nt, Artificial Sequence
  Synthetic
cagaauaucuccagacuuu

SEQ ID NO: 16331 - RNA, 19 nt, Artificial Sequence
  Synthetic
ggagacaacaagugagaau

SEQ ID NO: 16332 - RNA, 19 nt, Artificial Sequence
  Synthetic
ccauauuggccaagaauuu

SEQ ID NO: 16333 - RNA, 19 nt, Artificial Sequence
  Synthetic
cuguaaacucgcagauaua

SEQ ID NO: 16334 - RNA, 19 nt, Artificial Sequence
  Synthetic
uagauuugcugaugagaua

SEQ ID NO: 16335 - RNA, 19 nt, Artificial Sequence
  Synthetic
gguacuggguguaaauaua

SEQ ID NO: 16336 - RNA, 19 nt, Artificial Sequence
  Synthetic
aggaacagcuauugaguca

SEQ ID NO: 16337 - RNA, 19 nt, Artificial Sequence
  Synthetic
gggucuagcuacugucaua

SEQ ID NO: 16338 - RNA, 19 nt, Artificial Sequence
  Synthetic
cuguagaacaugcaagaaa

SEQ ID NO: 16339 - RNA, 19 nt, Artificial Sequence
  Synthetic
gaaagaauuuagugcucaa

SEQ ID NO: 16340 - RNA, 19 nt, Artificial Sequence
  Synthetic
gcgaaaggaugcuugcuaa

SEQ ID NO: 16341 - RNA, 19 nt, Artificial Sequence
  Synthetic
gcugaguauuagagaaaca

SEQ ID NO: 16342 - RNA, 19 nt, Artificial Sequence
  Synthetic
caucagaauggaaguauua

SEQ ID NO: 16343 - RNA, 19 nt, Artificial Sequence
  Synthetic
uauagaugauggagagcua

SEQ ID NO: 16344 - RNA, 19 nt, Artificial Sequence
  Synthetic
ggaagaaagagcaugaaga

SEQ ID NO: 16345 - RNA, 19 nt, Artificial Sequence
  Synthetic
guuagguugugguggaaua

SEQ ID NO: 16346 - RNA, 19 nt, Artificial Sequence
  Synthetic
aggaagaaagagaagcuaa

SEQ ID NO: 16347 - RNA, 19 nt, Artificial Sequence
  Synthetic
auacggagaugaagaagaa

SEQ ID NO: 16348 - RNA, 19 nt, Artificial Sequence
  Synthetic
gaaagagcaugaagauauu

SEQ ID NO: 16349 - RNA, 19 nt, Artificial Sequence
  Synthetic
agaagcaaguccagaggua

SEQ ID NO: 16350 - RNA, 19 nt, Artificial Sequence
  Synthetic
ggaaacagucuuagaaaau

SEQ ID NO: 16351 - RNA, 19 nt, Artificial Sequence
  Synthetic
gcuuagagguguacgagaa

SEQ ID NO: 16352 - RNA, 19 nt, Artificial Sequence
  Synthetic
uggaaguguuucuggguua

SEQ ID NO: 16353 - RNA, 19 nt, Artificial Sequence
  Synthetic
aggaaggacuuguggaaca

SEQ ID NO: 16354 - RNA, 19 nt, Artificial Sequence
  Synthetic
gaaacuugcuuuaggaaca

SEQ ID NO: 16355 - RNA, 19 nt, Artificial Sequence
  Synthetic
guuccaaauaccagaauua

SEQ ID NO: 16356 - RNA, 19 nt, Artificial Sequence
  Synthetic
agagagaagcuauaggaaa

SEQ ID NO: 16357 - RNA, 19 nt, Artificial Sequence
  Synthetic
aggauaagguauaaccaua

SEQ ID NO: 16358 - RNA, 19 nt, Artificial Sequence
  Synthetic
gagagaagcuauaggaaac

SEQ ID NO: 16359 - RNA, 19 nt, Artificial Sequence
  Synthetic
ggauuaugauguugaugaa

SEQ ID NO: 16360 - RNA, 19 nt, Artificial Sequence
  Synthetic
cuuuguagaugcagagaga

SEQ ID NO: 16361 - RNA, 19 nt, Artificial Sequence
  Synthetic
ccaaaaggcauauggguuu

SEQ ID NO: 16362 - RNA, 19 nt, Artificial Sequence
  Synthetic
ggagggaaaucuggcgaaa

SEQ ID NO: 16363 - RNA, 19 nt, Artificial Sequence
  Synthetic
augaagaggacaugaugaa

SEQ ID NO: 16364 - RNA, 19 nt, Artificial Sequence
  Synthetic
acacagggcccacuggaaa

SEQ ID NO: 16365 - RNA, 19 nt, Artificial Sequence
  Synthetic
aggaaugucugaagccgaa

SEQ ID NO: 16366 - RNA, 19 nt, Artificial Sequence
  Synthetic
cagaaagugagauuuguua

SEQ ID NO: 16367 - RNA, 19 nt, Artificial Sequence
  Synthetic
cagaugaauuagaagaaag

SEQ ID NO: 16368 - RNA, 19 nt, Artificial Sequence
  Synthetic
cuuacuguccugagaagaa

SEQ ID NO: 16369 - RNA, 19 nt, Artificial Sequence
  Synthetic
ucaggaaggacuuguggaa

SEQ ID NO: 16370 - RNA, 19 nt, Artificial Sequence
  Synthetic
ccaaauaccagaauuacau

SEQ ID NO: 16371 - RNA, 19 nt, Artificial Sequence
  Synthetic
ccgugugcuuagaggugua

SEQ ID NO: 16372 - RNA, 19 nt, Artificial Sequence
  Synthetic
uggaagaaguucacucaga

SEQ ID NO: 16373 - RNA, 19 nt, Artificial Sequence
  Synthetic
gaucgagagcacagagacu

SEQ ID NO: 16374 - RNA, 19 nt, Artificial Sequence
  Synthetic
gugugaaggccaccauuaa

SEQ ID NO: 16375 - RNA, 19 nt, Artificial Sequence
  Synthetic
gaauuagaagaaagagguu

SEQ ID NO: 16376 - RNA, 19 nt, Artificial Sequence
  Synthetic
gaagaacuuugaucaggaa

SEQ ID NO: 16377 - RNA, 19 nt, Artificial Sequence
  Synthetic
guggaacacugcaaauuau

SEQ ID NO: 16378 - RNA, 19 nt, Artificial Sequence
  Synthetic
gcaaauuauuccauagcac

SEQ ID NO: 16379 - RNA, 19 nt, Artificial Sequence
  Synthetic
cccaaggugugcagacuuu

SEQ ID NO: 16380 - RNA, 19 nt, Artificial Sequence
  Synthetic
agaagaacuuugaucagga

SEQ ID NO: 16381 - RNA, 19 nt, Artificial Sequence
  Synthetic
ggaagaagaugaaggcaga

SEQ ID NO: 16382 - RNA, 19 nt, Artificial Sequence
  Synthetic
cggcagaagaauagagcau

SEQ ID NO: 16383 - RNA, 19 nt, Artificial Sequence
  Synthetic
aguaugaagcagaggauga

SEQ ID NO: 16384 - RNA, 19 nt, Artificial Sequence
  Synthetic
aagcagaggaugaugaaga

SEQ ID NO: 16385 - RNA, 19 nt, Artificial Sequence
  Synthetic
acgaugaggaggaggauga

SEQ ID NO: 16386 - RNA, 19 nt, Artificial Sequence
  Synthetic
augaggaacaagagaacua

SEQ ID NO: 16387 - RNA, 19 nt, Artificial Sequence
  Synthetic
cagaaaggauucagauacu

SEQ ID NO: 16388 - RNA, 19 nt, Artificial Sequence
  Synthetic
agaugaaggcagaaaggau

SEQ ID NO: 16389 - RNA, 19 nt, Artificial Sequence
  Synthetic
aggaugaugaagaggaaga

SEQ ID NO: 16390 - RNA, 19 nt, Artificial Sequence
  Synthetic
caggcagacuggaggugaa

SEQ ID NO: 16391 - RNA, 19 nt, Artificial Sequence
  Synthetic
gaugaaggcagaaaggauu

SEQ ID NO: 16392 - RNA, 19 nt, Artificial Sequence
  Synthetic
augaagaggaagaagauga

SEQ ID NO: 16393 - RNA, 19 nt, Artificial Sequence
  Synthetic
ccaacagacuugugaagaa

SEQ ID NO: 16394 - RNA, 19 nt, Artificial Sequence
  Synthetic
acacaguacuggagaacuu

SEQ ID NO: 16395 - RNA, 19 nt, Artificial Sequence
  Synthetic
gcacauuguuuggagaaua

SEQ ID NO: 16396 - RNA, 19 nt, Artificial Sequence
  Synthetic
gcuuuaaagugaaggaagu

SEQ ID NO: 16397 - RNA, 19 nt, Artificial Sequence
  Synthetic
cauuagaguugauguguuu

SEQ ID NO: 16398 - RNA, 19 nt, Artificial Sequence
  Synthetic
gaagaaauguugaaagaag

SEQ ID NO: 16399 - RNA, 19 nt, Artificial Sequence
  Synthetic
ggagacagcuggaugauga

SEQ ID NO: 16400 - RNA, 19 nt, Artificial Sequence
  Synthetic
caucagaauaucagaacau

SEQ ID NO: 16401 - RNA, 19 nt, Artificial Sequence
  Synthetic
gaacaugacuguggauauu

SEQ ID NO: 16402 - RNA, 19 nt, Artificial Sequence
  Synthetic
agaacaugacuguggauau

SEQ ID NO: 16403 - RNA, 19 nt, Artificial Sequence
  Synthetic
acaaagauaagaagcagua

SEQ ID NO: 16404 - RNA, 19 nt, Artificial Sequence
  Synthetic
aggcaugaaauguaagauu

SEQ ID NO: 16405 - RNA, 19 nt, Artificial Sequence
  Synthetic
gcacuaugacagaggaugu

SEQ ID NO: 16406 - RNA, 19 nt, Artificial Sequence
  Synthetic
ugauagaacugcacuuaau

SEQ ID NO: 16407 - RNA, 19 nt, Artificial Sequence
  Synthetic
gcuggaggacguagaauuu

SEQ ID NO: 16408 - RNA, 19 nt, Artificial Sequence
  Synthetic
caacagacuugugaagaau

SEQ ID NO: 16409 - RNA, 19 nt, Artificial Sequence
  Synthetic
cgauauaugccauuuguuu

SEQ ID NO: 16410 - RNA, 19 nt, Artificial Sequence
  Synthetic
gcauuagaguugauguguu

SEQ ID NO: 16411 - RNA, 19 nt, Artificial Sequence
  Synthetic
guugauguguuuuguacua

SEQ ID NO: 16412 - RNA, 19 nt, Artificial Sequence
  Synthetic
cuagaucgcuuuaaaguga

SEQ ID NO: 16413 - RNA, 19 nt, Artificial Sequence
  Synthetic
gauucagggucucuugaua

SEQ ID NO: 16414 - RNA, 19 nt, Artificial Sequence
  Synthetic
ucaacuagaucgcuuuaaa

SEQ ID NO: 16415 - RNA, 19 nt, Artificial Sequence
  Synthetic
cacauuguuuggagaauau

SEQ ID NO: 16416 - RNA, 19 nt, Artificial Sequence
  Synthetic
gaacguguuaugaagaaau

SEQ ID NO: 16417 - RNA, 19 nt, Artificial Sequence
  Synthetic
guacuagugucacagcaua

SEQ ID NO: 16418 - RNA, 19 nt, Artificial Sequence
  Synthetic
acagcuggaugaugaagua

SEQ ID NO: 16419 - RNA, 19 nt, Artificial Sequence
  Synthetic
gauaauagagccaaugaaa

SEQ ID NO: 16420 - RNA, 19 nt, Artificial Sequence
  Synthetic
guauguaggaagagcuuaa

SEQ ID NO: 16421 - RNA, 19 nt, Artificial Sequence
  Synthetic
ccaagauaauagagccaau

SEQ ID NO: 16422 - RNA, 19 nt, Artificial Sequence
  Synthetic
uuacacaguugaagaggaa

SEQ ID NO: 16423 - RNA, 19 nt, Artificial Sequence
  Synthetic
auacagaucucgaggaagu

SEQ ID NO: 16424 - RNA, 19 nt, Artificial Sequence
  Synthetic
ugacagaucuccagcuauu

SEQ ID NO: 16425 - RNA, 19 nt, Artificial Sequence
  Synthetic
ugauauggguuuagagugu

SEQ ID NO: 16426 - RNA, 19 nt, Artificial Sequence
  Synthetic
caguaugcaaagaagauua

SEQ ID NO: 16427 - RNA, 19 nt, Artificial Sequence
  Synthetic
gcaaagaagauuacacagu

SEQ ID NO: 16428 - RNA, 19 nt, Artificial Sequence
  Synthetic
ugacaguaacucaggaaca

SEQ ID NO: 16429 - RNA, 19 nt, Artificial Sequence
  Synthetic
cggcaaagccagagcacug

SEQ ID NO: 16430 - RNA, 19 nt, Artificial Sequence
  Synthetic
cuacaugaccgauggacuu

SEQ ID NO: 16431 - RNA, 19 nt, Artificial Sequence
  Synthetic
ggaagagcuuaaaugguga

SEQ ID NO: 16432 - RNA, 19 nt, Artificial Sequence
  Synthetic
gagcuuaaauggugaggac

SEQ ID NO: 16433 - RNA, 19 nt, Artificial Sequence
  Synthetic
gguuuagaguguccaguau

SEQ ID NO: 16434 - RNA, 19 nt, Artificial Sequence
  Synthetic
agacaauaccacaacaaca

SEQ ID NO: 16435 - RNA, 19 nt, Artificial Sequence
  Synthetic
caaacuaccggaauauaua

SEQ ID NO: 16436 - RNA, 19 nt, Artificial Sequence
  Synthetic
cggcagucggauagacaau

SEQ ID NO: 16437 - RNA, 19 nt, Artificial Sequence
  Synthetic
agacagggcuugaugccau

SEQ ID NO: 16438 - RNA, 19 nt, Artificial Sequence
  Synthetic
cuuccaacagugacaguaa

SEQ ID NO: 16439 - RNA, 19 nt, Artificial Sequence
  Synthetic
ccaaacuaccggaauauau

SEQ ID NO: 16440 - RNA, 19 nt, Artificial Sequence
  Synthetic
ccauugggucggagauaca

SEQ ID NO: 16441 - RNA, 19 nt, Artificial Sequence
  Synthetic
cggauagacaauaccacaa

SEQ ID NO: 16442 - RNA, 19 nt, Artificial Sequence
  Synthetic
gcuuaaauggugaggacuc

SEQ ID NO: 16443 - RNA, 19 nt, Artificial Sequence
  Synthetic
uugaagaagugacagauga

SEQ ID NO: 16444 - RNA, 19 nt, Artificial Sequence
  Synthetic
gacaguaacucaggaacaa

SEQ ID NO: 16445 - RNA, 19 nt, Artificial Sequence
  Synthetic
gccccaaacuaccggaaua

SEQ ID NO: 16446 - RNA, 19 nt, Artificial Sequence
  Synthetic
caacagugacaguaacuca

SEQ ID NO: 16447 - RNA, 19 nt, Artificial Sequence
  Synthetic
acacaguugaagaggaagu

SEQ ID NO: 16448 - RNA, 19 nt, Artificial Sequence
  Synthetic
cuuuauugaagaagugaca

SEQ ID NO: 16449 - RNA, 19 nt, Artificial Sequence
  Synthetic
cagaauucauacaggaaaa

SEQ ID NO: 16450 - RNA, 19 nt, Artificial Sequence
  Synthetic
uugcagugaaugugggaaa

SEQ ID NO: 16451 - RNA, 19 nt, Artificial Sequence
  Synthetic
ccuuaugguugcagugaau

SEQ ID NO: 16452 - RNA, 19 nt, Artificial Sequence
  Synthetic
acauaaacuuucugaccau

SEQ ID NO: 16453 - RNA, 19 nt, Artificial Sequence
  Synthetic
ucuuaugguugcagugaau

SEQ ID NO: 16454 - RNA, 19 nt, Artificial Sequence
  Synthetic
ggauggaggaagaccgaca

SEQ ID NO: 16455 - RNA, 19 nt, Artificial Sequence
  Synthetic
agauaacggauuugggaua

SEQ ID NO: 16456 - RNA, 19 nt, Artificial Sequence
  Synthetic
cauuugaagcggagaaaga

SEQ ID NO: 16457 - RNA, 19 nt, Artificial Sequence
  Synthetic
agaaagaacccaagccaga

SEQ ID NO: 16458 - RNA, 19 nt, Artificial Sequence
  Synthetic
ggaaaggggacgagagcau

SEQ ID NO: 16459 - RNA, 19 nt, Artificial Sequence
  Synthetic
ccaucaaagauaacggauu

SEQ ID NO: 16460 - RNA, 19 nt, Artificial Sequence
  Synthetic
gccaaaugcugcugcccaa

SEQ ID NO: 16461 - RNA, 19 nt, Artificial Sequence
  Synthetic
gcaagaagcaacagagcac

SEQ ID NO: 16462 - RNA, 19 nt, Artificial Sequence
  Synthetic
agacccauguaaaggagaa

SEQ ID NO: 16463 - RNA, 19 nt, Artificial Sequence
  Synthetic
ucacaaggauccugccaga

SEQ ID NO: 16464 - RNA, 19 nt, Artificial Sequence
  Synthetic
agccaagucuucagugcaa

SEQ ID NO: 16465 - RNA, 19 nt, Artificial Sequence
  Synthetic
gaacagaucuuguccggaa

SEQ ID NO: 16466 - RNA, 19 nt, Artificial Sequence
  Synthetic
ugacuaaagacgcggguga

SEQ ID NO: 16467 - RNA, 19 nt, Artificial Sequence
  Synthetic
acgaugaugugcugacuaa

SEQ ID NO: 16468 - RNA, 19 nt, Artificial Sequence
  Synthetic
gcuucugacgagauggaaa

SEQ ID NO: 16469 - RNA, 19 nt, Artificial Sequence
  Synthetic
cuucugacgagauggaaau

SEQ ID NO: 16470 - RNA, 19 nt, Artificial Sequence
  Synthetic
gguuugaagugaacagauc

SEQ ID NO: 16471 - RNA, 19 nt, Artificial Sequence
  Synthetic
acucgugguuugaagugaa

SEQ ID NO: 16472 - RNA, 19 nt, Artificial Sequence
  Synthetic
ggacaaacaccuugggauu

SEQ ID NO: 16473 - RNA, 19 nt, Artificial Sequence
  Synthetic
gaacaaaugacgagaauga

SEQ ID NO: 16474 - RNA, 19 nt, Artificial Sequence
  Synthetic
ggaaauugauucagaggau

SEQ ID NO: 16475 - RNA, 19 nt, Artificial Sequence
  Synthetic
gaaugaacauguugaagaa

SEQ ID NO: 16476 - RNA, 19 nt, Artificial Sequence
  Synthetic
agagcuacuuuuagagaaa

SEQ ID NO: 16477 - RNA, 19 nt, Artificial Sequence
  Synthetic
gcaugaagaucuuagcuaa

SEQ ID NO: 16478 - RNA, 19 nt, Artificial Sequence
  Synthetic
gggaggaggagccggaaua

SEQ ID NO: 16479 - RNA, 19 nt, Artificial Sequence
  Synthetic
cgaagacacuugagcgaga

SEQ ID NO: 16480 - RNA, 19 nt, Artificial Sequence
  Synthetic
uguuauaaguguaccgaau

SEQ ID NO: 16481 - RNA, 19 nt, Artificial Sequence
  Synthetic
gagcagaugaaguuguaaa

SEQ ID NO: 16482 - RNA, 19 nt, Artificial Sequence
  Synthetic
ggaaagaguuugcaccauu

SEQ ID NO: 16483 - RNA, 19 nt, Artificial Sequence
  Synthetic
gggaaguguuauaagugua

SEQ ID NO: 16484 - RNA, 19 nt, Artificial Sequence
  Synthetic
aaauaagagaggacaacaa

SEQ ID NO: 16485 - RNA, 19 nt, Artificial Sequence
  Synthetic
aggaauguuuugauagcua

SEQ ID NO: 16486 - RNA, 19 nt, Artificial Sequence
  Synthetic
aggaacaaaugacgagaau

SEQ ID NO: 16487 - RNA, 19 nt, Artificial Sequence
  Synthetic
acaacugggucuuggagaa

SEQ ID NO: 16488 - RNA, 19 nt, Artificial Sequence
  Synthetic
caaaagaugccuaugaaaa

SEQ ID NO: 16489 - RNA, 19 nt, Artificial Sequence
  Synthetic
gcuaauuaucagaguacau

SEQ ID NO: 16490 - RNA, 19 nt, Artificial Sequence
  Synthetic
gagaaagagagauaaguga

SEQ ID NO: 16491 - RNA, 19 nt, Artificial Sequence
  Synthetic
gguuauuccacaagugcaa

SEQ ID NO: 16492 - RNA, 19 nt, Artificial Sequence
  Synthetic
uguaauaaccacaaccuaa

SEQ ID NO: 16493 - RNA, 19 nt, Artificial Sequence
  Synthetic
gaagaagauggguacauua

SEQ ID NO: 16494 - RNA, 19 nt, Artificial Sequence
  Synthetic
cuaaaauaagagaggacaa

SEQ ID NO: 16495 - RNA, 19 nt, Artificial Sequence
  Synthetic
ccaacugauuacuaagaau

SEQ ID NO: 16496 - RNA, 19 nt, Artificial Sequence
  Synthetic
aagagagacuggacaaaca

SEQ ID NO: 16497 - RNA, 19 nt, Artificial Sequence
  Synthetic
guaauaaccacaaccuaaa

SEQ ID NO: 16498 - RNA, 19 nt, Artificial Sequence
  Synthetic
aaauggagaucacuagaaa

SEQ ID NO: 16499 - RNA, 19 nt, Artificial Sequence
  Synthetic
gaaagaguuugcaccauua

SEQ ID NO: 16500 - RNA, 19 nt, Artificial Sequence
  Synthetic
ggggauacaucgaguucaa

SEQ ID NO: 16501 - RNA, 19 nt, Artificial Sequence
  Synthetic
ugaacauguugaagaagau

We claim:

1. An siRNA comprising a sense region and an antisense region, wherein said sense region and said antisense region together form a duplex region, said antisense region and said sense region are each 18-30 nucleotides in length and said antisense region comprises a sequence that is at least 90% complementary to a sequence selected from the group consisting of SEQ. ID NOs. 438-16501.

2. An siRNA comprising a sense region and an antisense region, wherein said sense region and said antisense region together form a duplex region and said sense region and said antisense region are each 18-30 nucleotides in length, and said antisense region comprises a sequence that is 100% complementary to a contiguous stretch of at least 18 bases of a sequence selected from the group consisting of SEQ. ID NOs. 438-16501.

3. The siRNA of claim 2, wherein each of said antisense region and said sense region are 19-30 nucleotides in length, and said antisense region comprises a sequence that is 100% complementary to said sequence selected from the group consisting of: SEQ. ID NOs. 438-16501.

4. A pool of at least two siRNAs, wherein said pool comprises a first siRNA and a second siRNA, said first siRNA comprises a first antisense region and a first sense region that together form a first duplex region and each of said first antisense region and said first sense region are 18-30 nucleotides in length and said first antisense region is at least 90% complementary to 18 bases of a first sequence selected from the group consisting of: SEQ. ID NOs. 438-16501 and said second siRNA comprises a second antisense region and a second sense region that together form a second duplex region and each of said second antisense region and said second sense region are 18-30 nucleotides in length and said second antisense region is at least 90% complementary to 18 bases of a second sequence selected from the group consisting of: SEQ. ID NOs. 438-16501, wherein said first antisense region and said second antisense region are not identical.

5. The pool of claim 4, wherein said first antisense region comprises a sequence that is 100% complementary to at least 18 bases of said first sequence, and said second antisense region comprises a sequence that is 100% complementary to at least 18 bases of said second sequence.

6. The pool of claim 4, wherein said first siRNA is 19-30 nucleotides in length and said first antisense region comprises a sequence that is at least 90% complementary to said first sequence, and second siRNA is 19-30 nucleotides in length and said second antisense region comprises a sequence that is at least 90% complementary to said second sequence.

7. The pool of claim 4, wherein said first antisense region is 19-30 nucleotides in length and said first antisense region comprises a sequence that is 100% complementary to at least 18 bases of said first sequence, and said second antisense region is 19-30 nucleotides in length and said second antisense region comprises a sequence that is 100% complementary to said second sequence.

8. The siRNA of claim 1, wherein said antisense region and said sense region are each 19-25 nucleotides in length.

9. The siRNA of claim 4, wherein said first antisense region, said first sense region, said second sense region and said second antisense region are each 19-25 nucleotides in length.
